United States Patent Application Publication US 2020/0377945 A1 - sequence listing, part 61

SEQ ID NO: 13808 - DNA, 7479 bp, Unknown
  gut microbiota DNA sequence
gctctagccatcttcagcggaaaaatattttaaatttcgcgtttgtcgcgctctgcggagcgctccaaacgctattttcacgggaggagtcgtggcgggaaacggcagctgctgcgcttgctccccggggggagctgtcgcgcagcgactgaggggctgcaaatcggcggagccggaaaaaacggttaaaagatcttcacgccgaacaggcgtgaatcttcagttttttccggtggagccctcctctttggggttaaaaggggcgagcagcccctttttcgtggctccagcgcgtcgaaatcgctgtgaccttgctgtgctgaacgcacagcatttgctgcgcaaaccggtctgcgacttgaaagccccactggggctttcatgccttgcaggcaccgccgcacttttcttctcttttggtgtcaaaagagaacgtccccggcagccgcctcttgcccagcggagcgtctttacactccgctggcgactgaggaagcaaaaaaacaaaacgcacaagttccgaagaacctgtgcgtcatggcaggggtagtaagtttcgaactcacggcacgcggttttggagaccgctgctctaccagctgagctatacccctatatacattcgctgaatgcttgattattatagccgatgcaacggggaatgtcaagccttatttttacttattctcatttttcgcgccgccgcagctgcagcagctctcctgcgcggcggaatccggcgcaggcagttggcttgccagctgttccagcgtaacgctgtcgatatactggttgatcacctcgtccagccccgcccagaacggcagggtgaagcactgctcggacatggggcattcgttggtcacgctgccaaggcacggaatgggcgctacgctgccctcgatggcgcgcaggatctcgccggcggtgtagtcggcggggtctttcgtcagccggtagccgccctgactgccccgctcgctcttgaccagccccacccgcgccagcggggtgacgatctgttccagatatttcaggctcaggttctgccgctcgctgatctccttcaggctgacggtagtgcccggcgcatagcgcgccagctccgccatcaggcgcagggcgtagcggctcttggtggaaaatttcatggtagtcctctccttgttgcagtttatagtatagcacgttactcggattttgcaaaggagaaacctcttgtgcaaacaaaaaaggtctgttatcataggatggaacagaacctatctttgaggagtgagagtatgacagaaaagatcaccgccgcagacgccatccgtctgctggataccggcaaggccgtagccgtggatgtgcgcgagccggacgaatacgccgtggggcacatccccggggcaaagctgctgccgctggggcaggtcatcgaccgcgccgccgaggtgctgccggacaaaaacgccctgtggctggtgtactgccgcaccggacgccgcagcgccgacgctgtgcagaagctggaagcccttggctacaccgacctgcgagacctgggcggcattttaagctggccctacgagatcgagggcgattttgaggggcatttttaaggttatatactttataagaagcacaaacccacaacagaaaggaaaccatgccatgtcgttccatgcaaaagagttcgcgggcagtcactgcggctgccgttaccagcaggattaccgccctaccttagggcgggacggcaaaaaggaatccggcacgctggaggtcatcaagttctactacgatggcgctatccgctttgagcagcactgctatggcgaggctgccacctttgtgttcggcgtgtgggcgtccggcatggatgaggacggcacgctgcactgggtactgccggaccgccgcaagagctattacgacgaaagctatctgcccaaaaagctggaccgggtggacgaagccggaaacctgtactttgacggcggcatcttcccgtggaagctggcggacgactttgccgaggataagcgctggggctaccccaagtggaaggtggcgctgggcaagctgaccggaaagggcaaaaaaggtgactgaatcacgaaaatccagtattcatattgacatactagggaatgatatggtataacttatccgttgaaaggattccgcatctgcacagggcattcaaggctcccgcagacgcgttcaataagaaaggatcattcctatggaaaacatggaaaaagtggtttatctggataatgctgccaccactccctgtgctcccgaggcactggaaatgatggtcaaagccctgagcggtgcctgcggcaaccccagcagccattacagcatcggctatgaggccaaggaattcgtggacaccggccgtgcgcaggtggcaaaggccatcaatgcaagtccggctgagctcttctttaccagctgcggctccgaggccgacaactgggccgtaaagggcaccgccttcaccaaggcacgccagaacaaaaagcacctcatcaccagcgcttttgagcatcatgccatcatgcacagcatggctgcgctggagcgcatgggctttgaagtgacctatatcaagcccacctccgagggctacatccgccccgaggacgtggaggccgccatccgtcccgataccgcgctggtcagcatcatgatggccaacaacgagatcggcaccatccagcccatcaaggagatcgccgagattgcccacaagcatggcgtgtggatgcacaccgatgcggtgcaggctgtgggtgccatccccgtggatgtgaaggagctgggcgtggatatgctgtccatgagcgcccacaagttcaatggccccaagggcatgggtgcactgtactgccgtaagggcgtatggccccagaacttgatcgatggcggcagtcaggaggcccgccaccgtgcaggcaccgagaacgtggccggcattgctgccatgggcaaggcactggagatcgccacggcgcatctggatgagcgcatggcccacgagagcgagctgcgcgattacgtcatcgaccgcatcctcaagaacatcccggaagcccgcctgaacggcggccgcagcccccgtctgcccaacaatgtgaacatcagcttcccgggtctggagggcgagaccatcctgctggatttggatatgcacggcatctgcgcctctaccggctctgcctgcaactccgacagtctggaccccagccatgtgctgctgagcatcggcctgccggaagagatcggccacggttccatgcggttcacctttggcccgcagaacaccatggaagaagcaaaatatctgtgtgacgtgctggaggaggtcattccccgccgccgcgctatgagttgtatgtggctgcagggtcagaacaaggcccgccagttcagcctgaagggagaacagtaattatggcaagtatgtatagtgccaaggtcatggagcatttcgcaaatccgcacaacgtaggtgagctgcccgatgcaaacggcgtgggtgaagtgggcaatcccaagtgcggcgacatcatgcgcatgtacctgaagattgagaacaatgtgatcgtggacgtcaagttcctcacctttggctgcggcgcagccattgccaccagcagcatggccaccgacctgatcaagggcaagaccgtggacgaggcactgaagctgaccaacaaggccgttgtggaggctctggaaggtctgcccccggtcaaggtgcactgctctgttctggccgagcaggctgtcaaggctgctctgtccgactactaccgccgtcagggcatcgacccggaacccatcgtgggcaagctggaagaggactgtgagcactgcgagagctgcggccactgatcctgacagtatcctaagcaaaaaaagaggacaccgcttcgtgcggtgtcctttttttgcgtccccacttgtgagaaaagggacaccggagcgtccgcagacgctccggtgtcccaaagttatagatccgttttccgcgccttacaccccgccgtgacggcgctgctcggcggcaagctcttgctgcaaagcggccttgcggtgatccagcagcagatccttgttgtacttgaaataccgttcgcagccgttctcggtgaggaactggtgagaggcggggttcaccgtaagttcggtgacgaacaccaccatctcctgactttccgcaaaggcctgctccataaagtcgaaggcggcttccagcgcagcagcggcggtcttttgagcggcttcgcgctggtccgccagcgcacggaactgaccgcgcagcaggtcgaaggcctcctgcgtaccggcggcgttggcgcggcgcagctccccttcccactggtgcagcgcggcctgcacctgcagacggttggtcagctctgccttgcccagcagcccggcatcgcgcttttgctgggtctcggcttcgtagtccttgatctgctggctgaacagttccgcagagccgtccgggatatcctccggcagggtagccagcgcctttttggtctcccgcaaaaaggcgtagcaggcatcggccacggcatccgcctgcaaagaggcggtaaaacgggtgtccagcccggccagcagcaggctgacaaggctgagccgctcatcaaagggagcctgcagcagccgggcgaacacggcgggctttgcctgcccggcaagaatttcctccacgccgtagtcgtcccggtacttgtagtacagatccagataagccgaaaattcctcggcgatcttcgggtgctggatatactcccggatcagttcctcatctgcctgcaagcccagtgcttcgtaggtgtccagcaggttggaaagatcctcccagccgcgggcagtgacgaactgggtgccgtccacgtccgcgttgatctggtaaaagttctggggatgcagctccagatagctcaggatggcgctgtggatatgggcggcgcgggcgtagtccttccacaccggcaggtcgggctcgatatccatacggcgcacgcggtcaagggttacgatgtcaaaatcccggacggatttgttgtactccggcgggttgcctgccgccacgatgacccagcccgcaggcacagcctgattgccaaaggtcttgcactgcaaaaattgcagcatggtgggggccaacgtctcggacacgcagttgatctcgtcgatgaacagaatgccctccgaaaggccggtggcctccattttagcgtagatgctggcaatgatctcgctcatggtgtactcggtcaccgacacgtccttatcgccgtagtggcgctgccggataaagggcagacccacggcgctctggcgggtgtggtgggtgatggtgtaggccaccagtgccaccccgcactcccgggccacctgctccatcacctgcgttttgccaatgcccggagggcccatcagcaggatggggcgctgccggatggcgggaatggcgtattcgcccagcgcatccttagcaaggtaagcttttacggtatgctcgatctcttctttggcacgtttgatattcataatattttcccctcttgtcaggagttgttcaactcgcggtacaggtcatcctcttcggccagagcgtccgcaagggcgctggccgggcgggctgccgcaccggtaaattcttcttcgtccagtaccaccttcatcgcccacggcggcacattggcatcatcgaaccgctcccctaaaaacaggaaggcggtatcgtagccgggacgccgcgccgggtaggtgcccatgccgtcggtgaagtacagcaggccgcgcaggttcgaaaacttcttttcggcgcaaagctgatccacatatgcaaaagccgggcggaaatccgttccgccgccgccccgcagctcaaagtggttcatggcgtggatgagttcatcctcgttgcggatgaggatatcctgccgcacggcgttgtcggcctgaatcaggtgcagattcatgcggtggaaaaagttttcccgccctttcagcagggtgtaggtctcagccagaaaggcgcgcaccagctcgccggaggtggagtagctggtatcaatgaccaatgccagctcctcgatttttttgctttcccggctttccagcggctcgatcaggggcaggttgccgtacaccgaaaggccgtaggtgtagaagttcagatcgaactcgtccgggtccagttttacctcctcgcgcaggacgcagaaccggcgcagaaagtccttgtagctgcggcggctgcggttggcggccttcacctgctgctttaaggcatcggcaccctcgcccgcctctttatcccgcaggtccagctcggtctgcatccgctccccgatcttctgccacgttttctgcggcagaggggtgggcatctgctggggctgctccggggcatccttcggccacaggcggtggtcgtcggtgacaaattcccgctccagctgccgcagcacgccgggcgtctgccgggtgagccagcggtacaccggcgctgccgccaccaccttttcctcagcggtgatctgccggtaggcattctgccgcacataggtcagcgggcgcatcacgcttttgcgctgtaagttgtcaatgacgttttccaccgcgatatcacacgcaaggctccacagctgcggctcgcggcggcctttcagccacaaatgccggaatacgcagtggaatattgtgtgcagatacaaccggttgagatatttcgggttctcctgataaagctgcagcaggcgctgtggctgataatacagggtctgtccgtccgtagccagcacccggcagcgctcgtccggggcggggttcagggcgctgagtgccatatccagaaaccggaagtccagatacagcccgctgcgcaccaccgccagcacctcgccacccatgcgtgcctgccactcctcgtgggtctccggccgctgggattggaagggcttgcgggggtcgaaaaatttttcttttggcaacgtgtggtcacctctcaaaaatcaaaatcgtaccgctgctttttggactggggagcatattttttgtgctccgcatctgccaacagggcggcagcggcggcgttttctgccttggcggcaagggcggcggcagatgcaaaagcggctttatccagcacgtccaacgccagcagggcgcggatgctgtcggtgtcctgtgcctttaaaaggcgggcgaacacccggtcggtgttggctgccagaaacgcccggtagtgcccggcggcagcttcggtcagctgccacggataccgcaggcggccaaagcagagcatggccataatggcggcgtcatcggcatcgtgcccctgcgggaagatggcgtcatattctgcggggaggaatttattgtcgagaaaacactgtctgtaatggtatccctgcccggaaaaggtgtgcagcaggatgtgggcgg

SEQ ID NO: 13809 - DNA, 9370 bp, Unknown
  gut microbiota DNA sequence
tctatgtccatcttcagctgatgtgtaagctgttttacataatcgagtgaaacttcatagccttctgcgattttttctgccggcatcccatcaaggatacgggagatcacaatgttctgagtggcttgttttctcgactctgcaatcatttcctcaatagaggggcaatgtttattatgcatccaattcaagtaatccaagcgttcagcttctatccgcgatagaagcctgactgcatagaaattgtcatctacctcgaagcgaacttcctctccgggtttgacttcaagtttttccagaaccgcatctgggagttttacagttccatcttcaccgactacaatattaaatttcttttccatcgcacactcctaaaatcacgcaaagttccttgcatccagtgcctttactcccgtaagaataccataagccccttccttttacaagacaatgcgcatttccattcgcactgttacatagaccagagttttctcgcagaaagctctggtctttttctattgaaaacatttgtccatcacaccagctacggctgtatggtctggttcacgaatgctaaacaagcaaatatccgtagggaaacgtacacttcccagctaatgaaaggtgggcattttacaatgaaccttccacttttcattagctctgctaattttctgctaatgaaaagccttttactcgttttatttcggggtttgtgttctttactcagattgacagcgcaacaaaaaatcaattgataaaacgttacttgttttacctacttttgcctaggatttatggcttcagcccctactcctaagcggaaggccgtgtgttcgaatcacatcggggacgccagcgcaaaatcaagcccggaaggtttacgaaccctccgggcttggtttttgcttttctatggaagatagccgctacaacgttcacaccagccttgccccggcgtggggcagtctttctgcgccaaggctttgcagcttttggggcagggcggcaaggtcgccgccggtataataccagcccgcagccagtgctgccagtgccagcagcaaaagcaccaccagtgccttgcccagcctgcggcgcttcgggcgcggcgatgcagactgttccgccgtgagggaggcaggggtcagggctgcatccggcacggctctgccatagggctgccagtttgtgcccccagcctgcggcagaccacaggcggcacggcgcagcatatccagcagccatagcccggggttctcgtccgacgcaaggcaccgcagccagcagccctttttaccgcccaccagcagcagacggctttggggcagttccacacagcccaccgtcagcgcggcaccggtcagcttctgcatgacctgcacccgcgccagtgtgcgggcaggctctgcctgcggtgccttgcgcagcttgcggctgagccgggcggtgagcgcggtattggcgtagctcatagcgccaaaatcgaataccttttccgcgccgggaaggttttccagccgggtctccagcagcgccccggcggcggtatcactgcacaccagcagcttgcggtgctgttccagcgcctgcactgcggcagcggcaagggtctgctccccttccccgtacagtgccagggcaaggcttgtccgcaactgctgtaccgcccggtgcagctgctgcggggtgctgctttgcagcgccaccagtgtttccgcaccccggctgcggcagtgcaccgtgccctgccaagtgtccggcagggcttccacagccttttgcacggtctgctccggtgcaccgaacagccgcagcacgcagcctgccgggcgctcttccttatttgtcatgacgcatcccccctgcggccgcaggggccgcccttactctgcccgcagggtctcgtccaaggcggtcagggcggcggggtcatgctgtgcgctttcggccagcacctgcgtaccggcaggggtcttgccctgtgccagccgcagcgccagttccagcgcagtctgtgcggcgcgggcgcggatgagcgcacggtccgggcgggagacgaacaacttcttcacatacgccttatctccccgggcagcgcccagatacaccgtgcccacaggccggacggcatcgccgccgccggggcctgccagaccggtaacgctgaccgcgatatctgcaccggcggcctttgccgcgcccagcgccatctgcgccgccacgggagccgacaccacattatattgcgcaatgaccgccgggtccaccccgacaagcttcgccttggcctgctcccagtaggtcacaaagccgtagccgaacacctcgcttgcgccggacacactggtcaggcgctgggcgatcatgccgccggtgcagctttcggcggtggcaatggtcaggccgttggcctgcagcgtatgcaccaccgtctcttccaacccggcgacatcctcatcatacaccgcatcgcccagcagatcatagaactttttggcgtaggcgcggcacatggtctgtgcctcggcgtcattctgcgcccgggcggtgatgcggatctcgcattcgccggtcttgcagtagatggcggcggtggggttcgggttttccagcagcgcacgcacccggtactccagattgctctcgccgcccagcacccgcagcgtcaggctgtgcagggcgcagctctgccgcgccagcagcagtgggcgtacgctttcctcccacatggccttcatctcatggggcacgccgggcatcagcacggcacagcggccgtcctgctcgaaccatgcgcccggcgcggtgccgtggtggttgaccaccttatgcccgtgcaccggcaccatggcctgcttgcggttgttgggggtggtctcgcgcccggtgcgggtaaagaagtccacgatcttctgccactcctccgggtcaaaggtaagggtatcgccaaagcaggcggccaccgtctccttggtcaggtcgtctgccgtggggcccagcccgccggtgaacaccagcaggtcgcaccgctgctttgcctcgttgacaaaatccgccagacggtcctggttatcgccgatggtgctctgccgccggacggtgatgcccagcgcggccagctcccggctaaggtactgggcattggtgttaagaatgttgccgagcagcagctcggtacccacactgatgatctctgctgtcatggacaaatcaaccctcgaattctacctgatcggtgatgcgcacccggatgcgctcggtctgctctgcggcttcggcttccaacgcggcaaggccgggcatggcagcttcggcggcaaggatctcctccagctcggggcggatcttcgggtgcggcggggtgaagatggtgcagcagtcctcatagggcagaatgctggtctcaaaggtattgatatggcgggaggtctcaatgatctcggtcttgtccataccgatgagcgggcgcaggatgggcaggtcctgtgcagcatcggtgcactgcagcgccttgacggtctggcttgccacctgtgccagactttcgccggtgaccagcgcttcacagccctgctttttggcaatcacgtttgcaatgcgcatcatgctgcggcgcatcagcaccgtgaacagcacatccggagcattatcccgaatgtattcctggggttttgtgtagggcactacaaacaggttggcgctgccggtatacacggtgatgagctgtgccagagcctttacttttagttttgcacgctcagaagtatacggaggggacgcgaaatggatgtgatccagtgccagaccgcgctttgccatgcgataagctgccaccgggctgtcgatgccgccagagagcatattcagggcacggccgctggtgcccacgggcagaccgccctcacccggtatttttgggccgtgaatatacgcgccgtaatctcgaatctccacaatgaccttgaactgcgggttatgcacatccaccttcaggtagttgtgcttgcccagcagataagcgcccagctcccgcatcagctccgggctggtcatggggtaggtcttgtcggcgcggcgggcttccaccttgaaggtacggatgccgtgcagcgcgctgcccagatagtcctcggcggtctggcagatggtatcgaaatccttttcgcacaccacggcgcggctgagcgcggcaaggccgaacaccttgctgacccgctcaaaggcaagatccatatccacgtcctcttcctcaggttccatataaaaagtggactgggtgcagtacaccttgaacttgcccaccgtcttaagacggtagcgcagaatcttcatcatggctgcttcgaactggttgcgattgaggcctttcagggacatttcgccctgatagcccataataatttccttcataaatgttgcatctcctgatgtgggatttataatggcctccgctttcgctctggccatattcagcggaaaaattgttttactctatgaatggaaaatgactgcggtcattttccattcaccctttcacgcattagggtcgcgcaggcaaactgcatcttcccatagaacggctgacagctttctcttcggacacgaatcgggccattccatcgcccgccctattgccctgcgggcaacagggtcccaccccagcggacggtcctcagagaaactgtcagccgttctgcggcttctgtttttactttctgatcttctgcaagtgcttcatgccgtcctcgaagcggttgaggaaagcatccacatcctccggggtgttatcggcacagaaggacacccggatggcagtgtcgatggcaagcgggtcgcgccccatggctgccagcgtgtggctgggctgaccgcgcccgcaggcactggccgaggaaacgtagatctgctcctcggccagaaaagccagcatcgtctcgctcttgatgcacatctcgctgaagttcagcacctcgggcacagcgttctccgggctgttgatgaccacctccgggaaggctttcagcccctcccgcagctgccggttcagcgcacgcatggcggtgtcccggctcttcatagtctttgccagacgggtggccgctgcggccagacccatagcatagggcaggttttcggtgccggggcgcatctgccgctcctgctcgccgcccagatagggcggctggaaggcctgcaccagccggtcggaaaggtaaagcgcaccaatgcccttgggggcatggatcttgtggccgctcaccgagagcgtatcgatgttgtccaacttgatgggcacacgcatccacgcctgcaccgcgtccacatggacgatggtgcggctgttgcggcgcttcacctcggcggcaaggcgctccacatcgttgcgggtgccgatctcgttgttcaccatcatgcagactacaaggatggtgtttttgtccacccgctccagcatggcggcaatgtccagcgtgccgtctgcccggggggctaccacggtaacatcatagccctgctttgccagccgctccagcgggcgctgcacactggggtgctcgaagccggacaccacgatgcccttgccgaaggtgcgggtctgcaccgcacccagcagcgccagattgttgctctcactgccgcaggaggtaaaatacagctcccggcttttgcagcccagcgtgcgcgctacggcggcgcgggcggcgttcagggcttcttcactgcgcgcgcccgggccatacaggctggaaggatttgcccaatgctcccgcatggccttgtttatgacgtccgccacctccggcgctacgatggtggtggccgcgttgtccagataatgtaactgagggttttgcagcatatatggatttcctgctttctgtcgttgttttcataataacccagaataagtatagcacaaacccttggataacgcaaaaaattttatgcatttatgggtgatttttgtaactgtacctccttgacaaacaccccggtggtgtgctatctttacagcatagaccgcatccctgctgacggaaccttgtggagcaccacagtgcaggggtgctggggatgtcaatgccgaccgtctgggcagccttgcgcaattgctgcgcaaagctgtccttttttgctatcaaggaggatgtctgtatgaagaccgatatcgagatcgcgcaggaagccaaaatgaagcctattacccagatcgcagctcagctgggtctggaggacgaaagtgtgatcccctatggccgctacaaggccaagatcgaccaccggctgatccacaacgccaaaaagcagggcaagctgatccttgtcactgccatcagccccacccctgccggtgagggcaaaaccaccaccagcgtaggtctggccgatgccatgaacgcactgggcaaaaagaccatgctctgcctgcgcgagcccagccttggccccgtgttcggcgtaaagggcggcgctgccggcggcggctacgcacaggtggtgcccatggaggacatcaacctgcactttaccggcgatctgcacgccattggcaccgccaacaacctgctggctgccatgatcgacaacagcatccagcagggcaacccgctgaatatcgacccccgccgcattacatggaagcgctgcatggacatgaacgaccggcagctgcggtttatcgtggacggtctgggcggcaaggtgaatggcaccccccgcgaggacggttttgatattaccgttgccagcgaggtcatggccatcttctgccttgccaccagcatctccgacctgaaagagcggctgtcccgcatcgtgtgcgcctacacctacgacggcaagccggtgactgccggtgagatcggcgcagccggtgccatgaccgccctgctgaaggacgcactggacccgaaccttgtgcagacgctggaaaacaaccccgccatcatccacggcggcccctttgccaacattgcccacggctgcaacagcgtgctggccaccaagctcagcctttcgctggcagactacaccatcaccgaagcaggctttggtgcggatctgggcgcggagaaattcttgaatatcaagtgccgctatgccggtattgctccctctgcctgtgtgctggtggctaccgtgcgcgcgctcaagagccacggcggcgtagccaaggccgatctgaaccagcccaacctcgaagctgtcaaggccggtgcttccaacctgatccgtcacatcgacaacctgaagaacggcttcggtctgccggtagtggttgccatcaacgccttccccaccgacaccgccgaggagcaggcctatgtggagcaggtctgcgccgagcagggcgtgccctgcgtgctgagcgaggtattcgccaagggcggcgagggcggcaaggcactggctgagaaggtgcttgagattctggaggatcgtcccatccagtacacctacccgctggagatgcccctgaaggacaagatcaacgccattgccaccaagatctaccgcgccgatggcgtaaactacagcgccgccgccagcaagacgctggccgagctgaccgagatgggctacggcgacctgcccgtctgcattgccaagatccagtacagcttcagcgacaacgccaagctgaccggtgcgcccaccggctttaccatggaggtgcgcgaggtgcgtctggccgccggtgcaggcttcgtggtcgtcatctgcggcaacatcatgaccatgcccggtctgcccaaaaagcccgccgccgtgaatatcgacgtagacgccgacggcaaaatcaccggcctgttctgataaaaaactgataaacataaaaggcgctgtccgcagggacagcgccttttatgttctttttactccatggtgtggctgcaaaggtagtccacccatgcagcatagccctccggcttgatgtggtaaccgtccggctgggcgtagctttcgatcaggtcgccgttttcgtctgccagcacctcccacaggttgaggaaatagcagtccttttccagcgcaatggcggccagctcgttgttgatgcggcacaggcggtcgcggttcagccctgcgtggttttcctgtgcgctcacctccggccttaccggcgtgatggactgcacatagatctttgcatccggcagcgcctgactgatcatatccagcatcaggcggtagtaggtcagaaaactggtgtaatcggtgtcccgtcccagcacattgctgcccagcagcacatagacggccttgggctgctgggcggtcaaagcgtccaacgggatctctgtcacgccgtccacccgcttgcagctggtgccgttgacaaaggcgttggggcccacccccttataggcgcagaactgcgccccgggcagaccggtatcgtagatctgcagcccctgcgtcaggctgtcgcccacaaaactgacctgcgcaaaccagcttttttccaccggagcgctggccggcagcgctgccatgcggaagtccagtgcggtctcggtgctatcctccagcgtctgcacccggagctgccgcgccagcgggtagttgaccgtgttccatgtattatccgtggtcacctgccgcagaatggtgttttggctcaggacggtatccacgcgctcccggtgcagcaccttccacagaatgccgatggcgctcagcagcgccaccagcgccagaagggcgacgatgataaacaccctgcgccagcgccggtgcaggatgcgccgccggtattcctgataatctgccattgtcgttccctcgcttccggcccggaatgcgggctgttctatttatagtatagcataactgcacccaacagcaaaccccatttgccaaaaatgtgctgccggttttgcacggtacggggctgttttggtgcaaaactgacagagcactgccgcaaacgcttgcatcccataggcagaatgtgttatactaggatgaatcaaacgacagggaggctttcacgatggcatatacaccgaaactgacttataaaggcaagcccctcgtccgcaaggacaacgagctgtattacggcagcatgaccgatccctatgtgctgtatctgcagatcctgaccaccaccccggtgggcgagcagcaggtagccgacaaggtgcacctgatgctgctttctaccgataccaccaaggcaccgcaggagcgcgtagcgcgccagaccaccaagcacggcctgtacaatgcgctggacattggcggcatctggctgcagaaggccaacgagacccgctgaatcaaattaaaatgaacaatgccggacagtctgcggactgcccggcattgcgttttttataaggaattttattttgtagtt

SEQ ID NO: 13810 - DNA, 262 bp, Unknown
  gut microbiota DNA sequence
tcgagggcttgaccacaattcgcttgagacttttaagtcaacgaaaaaatgttagcagtgattattcagttttgaaggcacgtccttctaagaaatgctggacagatacacagaaatgtgctatactgattcagtcaaatcggtcggtgtcgatgacggtaaggttccacctgttcccattccgaacacagaagttaagcttacttgtgccgaagatagttagctggaaacggcttgtgaaaataggtagtcgccgacttaa

SEQ ID NO: 13811 - DNA, 10765 bp, Unknown
  gut microbiota DNA sequence
aggttttgactgagggagttaagtttttcttcttaaacgtttcattttgtatttttttcgcactgcggtacaaagtttcaagaacttttttgatttttcacagaaatgtaatgacttttttcgtaaaatcgggtatactgtatcttgcagggacagtggggccgcaaccacttccccgcacatgattcctcctcacaccaaagcaataccccaaacaagaaccccctccggtgtaccgcaagcgccggagggggttcttgttgtttcgttattttttcaaagggtacgcagctttgccgcaaacaccgagagcaccactttggggttcacctgtgcgcccagccgctgcaaggcggcatctgccagacgcaccgcctgccgcgcctgtgtgccctgcaccggggcgcggggactgctgcgcagaccagctgctgccacggcgcgaaaatcggtcagcagggcggcggcagcagctttatccttttcgtaagcggcaagcagcacggcggcggtgtagctgtcccgggcggcggcagcgcgggcaagttccagcgccttttccacctgtgcggcgcgggcttcgtcccgggcgaccgccaacaccgtgccgatatgaccatcgaacagctcactgtacagtgcggctgtttttttatccaccccctgcgccgcgcagtagcgggtgcagtcggcgggggacaccggtgccaccgcaaagctgacgcagcggctgcggatggtgggcagcacactggccagagaatccgccgtgagcaggaacagcaccccttccggcggctcttccatgaccttgagcagggcgttggcggattcctcgttcatccgctccacatggtacaaaagcaccgcgcgcccctcggcggaaaggctggtgttgaaaatttcgctgcgcatggcggtgacctgacccaccagatacttcccgccgctgcccatgccggacaccgaaatggcttcccgcacgatgccggtctccaccgtgccgctgtcgcgcttaccggcctttgccacggcgcggcagcactcgccgcgcaaaagggcttcggcggcggcaccgcctgccgggtagagatagtcggcggcgatgcagcgggcggcaaagccggtgccaagaccggcttcgcccaccagcaacacgctgtgggtcagccggcgggtggccagcatctgctgcacgctggttttcagttctgcgttgccttccatgcggtccagcatcatgatgggagtactccttttgtgaaacggtaaaacgatttaaaatgccctccgcgttgctctgggcatgattcaaggaaagattatttataatttcgcgtttgtcgcgctctgcggagcgctccaaacgcattttcacgggagggtttatctcctgttcttccgtttccactgctcccggcgcacccatgcgcggagggagcggtaggccatgggggcaaaaaagagccagacgttgagcatggacaacaggtagtccagcttgccgggcagggaagcgcccagaaagctgaacacccacagcaccgctgcgaaaacgccgaaatattttacccggatggggatgacgaagaagagcagcagctgcacctccgggtagagcatggcaaaagccagcagcagcgaaagagacaggcagtaggtgctggcggtcacaccggtgagcaggcagcccagcaccgtgcccagcacgccggacagcagatacaccgtgtagcggaaatcgccccactcccgttccagcgccgtgccgatgaaccatgtgaagtagatgcccagcaccacgctgaggatgctgccgccggaaaaggggatgaatataaagctgatcacccgccagacctgcccttgcagcagaaggaaccggttcagccccagccagcccgtgatggtacggtcaataaacagctcgatggccagcactaagatctgccccgccaccagaatattggtcagattcgggattccgtagcggccatacttgcgctccagcttattcagccagttgttcatgtgtttcgcctccgttgcgggttgccccgccagtttcatgttacccctattttaccatgacagtcccccgcattcaagaaaatccacgcggaaggcgttgaaactgcactttctttcccggcagacaggctgcacgcgcagttttttcacaccgcagccgccggggtgtggaaaaggcgggaaaagcacagcattcatgcgggttttaagtcccaaaacgacaaccgaaaattgtatggactatccgttctggaatgaacttttcactttttccaccgggttttccaccgtttttgtgaaaaagaagcgcagtttccaacgatgttttccaccttttccacatagttttccacatccagtggaggaaagtcctatacaagccgtaatggatgccgccgcattctggaaatttgtgggcaaaaatgtgggcattctgccttttataaaaaagaaagtcgaaggtttttcttttgtttttacagtttactccggcttacgggtttgcttttctccaatctggaatcttaccccgggcagttttccacaaaccgccggggagaaaagcccggtgtggaaaacggacacaaacggtgattttccacactgtttttatcccggctgaaccctctcagtcgcctgcggcgaccatcgggagcagactgagagggttggatgcaaaaataagccctctcgggcagacaaagtgcctgagagggcttataaaaccatattttatgccttagcagcagcgcacactagggtatgcagcggcgcaggggtcagattttcgcttcctctaagtggagatacaccgcaacgtaggtcttgtcatccataacacgggtaacaatatcatactcatcgatccggtacaactgctgttcatcaataaagtaaacaggtccgtactgcgtcagattttccagggtcagcttaactgcctcaacggtactttcgcccgaaacattcaatgctatcgggtctgagaggatcatccaataccagctctccccaaatccgcgcccgttcgcctcatgatccccgccgtctctggctttgaacttcccgtcctcgctgattttctccagagcaaccatcatatccgagtgtttgacgtcaactttttgtaccggtttgcccggccgcttgctgttgatttgctctacaaaccaatcttcgtataccttgccaatggcagactgaggttgttctgctgcgccgcaggcggtgaacaatgccaaggccagcaccgcggccagtaaaagtgctacaaagcgtcttgtctttttcatgatacacctccggtaacaaaaatacaggttctatccaacgtactggaactcaaacgacctcttttattattttacatcatcacacccgtggtgtgtcaattgacagagcatataaaatattgccgtccttttgggcaaatgcgccaaagggttggatgcaaaaaatgccgggcggtccgcagaccgtccggcattgcttttttctttacatcatattgcggaacaccagctgtgcgatctggaaatagaggatcaggctgcaggcgtccacgatggtggtgatgaagggggtagccataatggcggggtcggcacccagctttttggcggcaagcggcagcataccgcccaccagctttgccagaatgacgctgaagaacagcgacacgctgaccacgatggcgtagcccatcacgttggcgtactgaccggggaagaggaaagtgtacatcaggtagatgcgcaggccgttcacgatgcccagcactgcgcccacgatggcagacacccgcagctccttggccagcacccgcataaagtcggcgggctctacctcgcccagtgccagaccgcgcaccatcagggtgctgatctggttgccgcagttgccggcggtatccatcagcatgggcatgaaggagaccagcagcggcaggctgacaaaggcttcctcgtagtgggtggtgaccataccggtaaaggtagcggacagcatcaaaatcagcagccaggggatgcgctgcttggcgtgggtccacacgctggtgccaaagtaggtggtggcgtcgtcatccgggagaatggcggccatcttctgcatatcctcggtgctctcgtcggtcagaacgtcaatggcatcgtcgatggtgatgatacccacgaacatcccctcgttgtccagaacgggcatggcggtaaagtcgtagcgctgcatctcacgggccacgaactcctgatcgtcggtgaccttcacggtgaccagattgtcctccatgatctccgtgatgggggtcttggggtcggccagcagcagattgcgggcagagacaacgccctgcagccggttgctctccaccacatagcaggtgtagacggtctcggcgttctcgccctgcttgcggatggcggcaaaggcctgttccaccgtcatatccatgcgcagacgcacatattccggggtcatcaggctgccggcagagctttccgggtagttcagcagcttgttcaggctctcgcgggtctcccgggaggatttttccagcacccgcttgaccacgcccgcgggcatatcttccagcaggtcggcggcatcgtccagactcatctcctcgatggcgctcaccagttccacgtccgagaaggcgttcaccagatcgtcccgggcttcgtcggacatataggcaaaggcttcggtggcaacttcctttttcagcagacggaacaccaccagacggttgttctcgtccagctcctccagcagctcggcaaggtcggcgggctgctcttcctcggtcacctcgcgcagcttgacgtactgctttttgatcagcagcttcagcagacggctcttagtcagcatctcggggtttgccttgacctcttcgtcgttggcttcctcccgctctgcctcccgcatatcctgcttcaggtcctcggtggcttcctcgttcagatcctccgccagtttctgacgcacctcggcggggatatcggcgggcagttcctgcaccggcaggttctgttccgtgttggtttccagcttcttttcttccatatccatgggctacctcctctgggtactatacggcacggagggctttctccgcgccggaggatgcagcaggtcgggaaacaaaaaacgcgccgcccggtgccggaatgccgcaaaagcagccgtttccgcgcacgcaaagccgcgcctttcctatgccgggggctttttaagccgccggatgcaaaaaggcgaacgcagtactttttgttgtccgatctaccgcatcggtggatctacttcgactatgatcagggtccattgtcctgcgttcacctcccagttttcgtaaattccacagccgcagcacccgcgccgggcactgcactggctatatccttttttattatagcgccgcaaaaaaatggggtcaaccctaaagcgaagttttgcaaagatttttacggtgtcttacagaaacaaaacacccttctccgtgttgcggcgcacagagaagggtgttttgcttggatattgccttggtgtgaggaggaatcatgttacttgggaagtggttgcggccccgcttcccatggcaaaagtataacagctttcacaattcatttcgttaagaagctatgaagaaactgtaaaaaggaagcggaaaattctggaagattttgtgataaaaaatcttcttgacaatatttgttttatcctatattataatagtaggataccaccaaacggaaaggatgctgaaaatgtctgcttttgaagtaaatttttattataaagcagacggcagctgcccggttcgtgattttctggatacactggacaacaaaatgctggcaaagcttttaggcacgatctccctattggaaaccaatggcacacaactgcgggagccttattccaaatcattgggagatggcatttttgaattgcgtgccaagcaaagcagcaacataacgcgcattttatatttcttcgtagtcgggcatcagatcatcctgacaaatggctttgtcaaaaagacacaaaaaacaccgccggaggaaattgcactggcgcaaaaatatcgtgcggactatttttatcgaaaggagagttcctcatgagtgattttcggaattatttgaatgaacaattacagcggccttcttttaaggccgaatgggatgctcttcagccggagcttaccattgcgcaagctatgatcgatgcccggaaggaaagcggtctgacccagaaacagctttcagagcgcaccggcattgcacaggccgatatcagcaaactggaacggggaaatgcaaacccttctctgcgcaccttgcagcgccttgccgctggtatggggatgaacgtcaaaattgaatttgtgacgaacaaataacttttatttcgtcaatatataagcccggagcgtctgcggacgctccgggcttatagtttcatttacacaaaaatacgccccggtcaccttgcggtgagcggggcgctaaaaactgatgcagttttttcactggggcaagatccctgcaaggcaggtcttctgccgcaggcggagcaaggtatctgcacacagaccttatgctcctgacacacgcggggtgtgctctcaagggccctcgcgggcgctttggtatctcaagcccctgcgcaaaaggaggggaatgaaatcaggtttttcgaccgttctgtcaggtacagggcaaaacgttcagcctgttctgtgcacggcaaaggcaaattccacagttccgcaccgctgcattgcgcagtaaccgccgatgcggggctgccgctcttcacacgggaaagagcaggggccgctggttcatttggtgtctctgccgctgcttaaaaacagcttacttgtacagctcgaccagacgggtcaggtgctcgtagcggtcgtttgcaacctcctggttgcgagcgaacagctccttagcacgctcggggaaggcgcgggtcagacggctgtaacgggtctcgtttgccagcagagcctgatacttctcgttgtccacagccttggaggtcagggtgaaggggttcttgccctgagccttgttggcggggttgaaggtgaacaggttccagtagccagcctcgactgccttcttcatctcgttctggcagttggtcatgccgcccttgacaccgtgcagctcgcagggagcgtagccgatgatcagagaggggccggggtaagcctcagcctcggcaatagccttgacagcctggttcatgttagcgcccagagcgatctgagcaacatagatgtaaccgtaggtcattgcgatctcggataggctcttcttgctgatctccttacctgcagcagcgaactggcagacctcgccgatgttggaggccttggaagcctgtccaccggtgttggagtacatctcagtatcgaagaccatcacgttgacatcctcgccggaagccagaacgtgatccagaccgccgaagccgatgtcgtatgcccagccgtcgccgccgaagatccagacggacttcttggcaatgtactgcttgctcttcaggatctctgcagacttctcgcagccagcagcagcagccttctccagctcagcgatcagggcctttgcgggctcgtcgttggccttggtgttgttcttggttgcgatgaacttctcgtaagcagccttcagctcagcagaagccttgtcggaaccagcaacctctgcgatctccttgatcaggttctcgcggatggtcttctggccgatgtacaggcccagaccatgctctgcgttatcctcgaacagggagttgcaccatgcaggaccatggccgctgtccttgttgacggtgtacggagagatggaagcggtgccgccccagatagaggagcagccggtagcgttggagatgtacatcttctcgccgaacagctgagtgatcaggcgagcgtaagaggtctcggcacagcctgcgcaggagccagagaactccagcaggggctggttgaactgagagcccataacggtgtcatcggccatcttggtagccttcttggagatgttggccacgcagtagtcaaagactgcctgctgatcggcctggctgtcctgaggaaccatggtgatagccttggtggggcagacggtgacgcactcgccgcagcccatgcagtccagcggagaaacagccataacaaacttgtactcgggggtcagcttgttatcgcggctcttggtctgggcaggagcagctgccagctcgtcagcggtcagcaggaagggacggatggttgcatgagagcacacgaatgcacactggttgcagccaacgcactttgcagcatcccactcggggacgttgacagcggtgccgcgcttctcgtatgcagaagcgccctgctcccactcgccgtttgcatttgccacgaaggaggagacaggcaggctgtcgccgtccatacgggcaatgggctccatgacctcgcggatctgcttgaccagttccggacggccagccagagccttgggtgcgggatcagcctcggggttggaccaggatgcgggcacgtctaccttgtggatagcgtcaacgcctgcgtcaatggccttccagttcatctcaacgacgtcctggcccttcttgccgtagctcttctgagctgcctgcttcatgaagttgacggcatcctcgatgggcatgacgtcagccagcttgaagaatgcagactgcaggatggtgttggtgcgcttgcccatgccgatctcgatagccttatcgatagcattgatggtatacagctggatgttgttgtcagcgatatacttctttgcctcggcgttcaggtgctggcccagctcctcatcggaccactggcagttgatcatgaacacgccgccgggcttgacatcctggaccatcttcatgcccatgtggatgtaagcggggttgtggcaggccacgaagtcagcctggttgatgtagtaggggctgcggatgggcttgtcgccgaaacgcaggtggctgatggtcacgccgccggtcttcttggagtcatactggaagtatgcctgaacatacttgtcggtatggtcgccaatgatcttgacggagttcttgtttgcgccgacggtgccgtcgccgcccagaccccagaacttgcactccttggtgccagcagctgcggtgatgggagcgggcttgacctcaggcagggacaggaaggtgacgtcatcggtgatacccagagtgaaacgctccttcggctgatccttctccagctccttgtacagagcgaagatggaggacgggggagtgtccttgctgcccagaccgtagcggcctccggtcagaacgatatcgttcaggccagcctcacgcagggtagcggcaacatccagatacaggggctcgcccagagagccgggctccttggtgcggtccagcacagccaccttcttggcggtcttgggcaggaccttcagcagagcggaggacacccagggacggtacaggcggaccttgatgataccgaccttctcgcccttggcgttcaggtagtcgatgacctcgtcagcaacgtcgcagatggaacccatagcaacgatcacgcggtcagcatcggctgcgccgtagtagttgaacagatcgtagttggtgcccagctttgcgttgatcttagccatgtacttctcaacaacagccggcagagcgttgtaaacgctgttgcaggcctcgcggtgctggaagaacacgtcgccgttctcgtgggaaccgcgcatcttggggctttcggggttcagagccttcttgcggaactcctcaacagcctccatgttgcacatttccttcagatcagcgtagtcccacttctcgatcttctggtactcgtgagaggtacggaagccatcgaagaagttcaggaagggaaccttgccctcgatggcgcacagatgtgcgacaggggacagatccataacttcctgcacgctgctctcgaccagcattgcaaagccggtctggcggcaagccataacgtcgctgtgatcaccgaagatgttcagggactgggtagcaacggtacgtgcagaaacatcgaacacgcagggcagctgctcagcagcgatcttgtacatgttggggatcatcagcagcaggccctgagaagcggtgaaggtggtggtaacagcacctgcacccagagagccgtggacagcaccagcggcgccggcctcggactccatctcaacgaccttgacctggttgccgaagatgttcttctggccggctgcagaccactggtccacagagtcagccatcggagaagacggggtaatggggtagatggcagccacgtccgtgtaggcatacgctacatgggcggcagcggtattgccatccatagtttgctttgctctaggcatttttcttcctccattattcagaatttggtaccttttgcgcggggcaatatgcccgctgggaccggagaaccccataaaaggcactattgcttgtatactataatagcagattccggcaataaagtaaacgcaaaccgcccgacaaacgcaccaaaaattaagaaattttttagcggttttgtactttctttagtgcgctaaagcaagcagtgatgcagattttcggtttttgcccaccgtcgcttccagaaattgtgatttttttcgcaagagggggacgaaccctcttgtatttatcatatctt

SEQ ID NO: 13812 - DNA, 2860 bp, Unknown
  gut microbiota DNA sequence
agagcataaaaccggcgcagcgccggaaaaggggcgtaaggtaaatgaacgatacagtacactttgaaaaaactctctccagcgagactctgttcgaggggcgggtcatcaccctgaccaaggacactgcactgctggaaaacggcaagaccgctacccgcgaggtggtgcatcaccacggcggtgcctgcatcctgccttattttgcagacggcaccatctgcatggtgcggcagttccgctatgccatgcagcagcagctgtgggagctgcccgccggtaagctggaaaagggcgaggacccctttgcagccgccaagcgggaactggaagaggagtgcggcctgaccgctgacaactacatctcgctgggcgagttctaccccaccgtgggctacgataccgaggtcatctatacttgggtagccaccggtctgcacgagaccaagatgcaccttgatgcggacgagtttctgacccccgaccgggtgccgctggaaaaggcgtatcagatggtcatgagcggcgagatcaaggacggcaagaccattgcgggcatcctgaagctgaaagctctgctggccgagggcaagctgtgatcttatacgaggacgccgcccttgtggtgctggacaagcccgccgggctttccagcgaggagggcgtgcccgccgcgctgcgggcgcactggaacgcacctgatgcctttgtgggggtggtgcaccggttggacactggtgtgtccgggttgatggtctatgcccgcaccccggcggctgccgccgccctgagccgtcaggtgacccaaagtcaggacgcctacgccgtgcaggatggccgcgccgagggcaaagctaccgcgccgcagttcgtcaagcagtaccgcgcgatcattgccggtgcgccggacgcgcagctgcccgccgccggggtgctgcgggactacctgttcaaggacagccgcaagggcagggtgttcccggtcagccgtccccgcaagggggtgcgggaagcggtgctggaataccgcatccttgccacggcaggggagagctgccttgcagcgatcaccctgcacaccgggcgcacccatcagatccgggtgcagtttgcttcccgcaggcacccgctgtacggcgacggcaaatacggcagccgccagaagggcagcattgccctgcaaagctgcgggctgcgctttgtgcacccggacaccggtaagcccatggccttttctctgcccctgcccgccgccgcaccgtggaaggagtttttggaattaggtgagtgatatggaacagcaatacaagactgatgccgaaatttacgccgtgctggagcgggagatcatcgacctgaccatccgtcccggctcttcgctgagcgagaacccgctgtgcgcccggttcggtgcgccgcgctccctgatccgggtggtgctgcaaaaattgcaggaaaacgggctggtgcgcatcgtgccctataagggcaccaccgtcacccggctgaaccggcgcatcgtggacgaactgatctacgagcgcaccgccgtggaggggcgcattctgcgggattttgcccccaacgccaccccggcgcagcgggcgcagatccgtgcgcgggtggacgcctacgaagcccttgcccgcgccgagaccccggacttcaacaaactgtacgagatggactgccgcctgcatgaaacatggtttgccgccatggacaagatgtacctgtggagtaccttacagaacgcccacgccgattacagccggttccgtatgctggacaccatgaccaccggcgggctggacgaggtgatcgccgaccaccgcaacctgctgaacgccatcgagcggtgcgaccttgccgcctttgagccgctggtggagcgccacctgtacggcggcatccgccgccttggcagcaagctgaccgaggaatacgccgacttttttgagccggaaaacgtgaaataagccaaattgttccacggggaacaaagactatatcaaaagcccggagtgtccgcagacgctccgggcttttgatattcagaacaccccggtgatgaagatttccagcccgatgccgatgaggatgacaccgcccagaatattggccttgccggaaagctgtgtgccgaactttttgccgatgcgcaggcccgccatgcagaggatgaaggtgaccaccgcaatgatgatggcagcggtaagtgccatcagccagccatattccgagatggtgaagcccaccgaaagggcgtcgatgctggtagccacgccctgcatgaacagtgctccggcgctgagctgcgccgcctcctcggcttcctcgccccggatgccgtccagcagcatcttgccgccgatgtaactcagcagcgccagcgcgatccacgggatcagggtctcaaaggacgcaaacagctccacgatggtatgcacgcacacccagccgatcatgggcattgcggcctgaaaaagggcgaaagtgcccgcaattttgcccatggcgcccttgttcatcttagggtcgtgcagaccgtttgccatggacaccgaaaacgcatccatcgcaagccccacgccaagcaaaacgctgttgagaaaaaacacaaaactccattccattctgtctgcctcctgtttgttgaccgtaatccaaaccaaaacaaaacccggccccgggcgcgttgtacgtccggaaccgggtgattttttgagatccactccatgtgcacgggcgcagcaaacacgcaccaaaacacatgagtctcgcaaatgaaagcaagccagaccgaaacagtcattatgttgacttgctgcgctctgcaaagcgcctgctactcccccac

SEQ ID NO: 13813 - DNA, 13435 bp, Unknown
  gut microbiota DNA sequence
ttgcgtcttgctggccgctgccccaacaactcctccctgcttccgccgctggcggcggtcgtcgtcgttgcactttgggcattttcagcggaaaatcatttgatatttcgggtttcaggaaagtctgcggagcttgtcggggcaaagcccctccatctgctaacgcagaccgctctgccgcttaaaagccccactggggctttcattgctgcgcaaacgcggactatcccaaacccattttcacaggaggggtcgtagaggaaaactgtccctcattccttctcttcggggtctgcctccggggcttcggtggcggcggcagcatcggcggcttccatctcggccagctgctcggcggtgggctctgcatcggcctcagaagcgtcgatcttctcggtctgtgcttcatcgtcgtggtcggtgcgtgccagcaccatcaccttgtcgttctcgcccagacgcatcacccgcacgccggagccgtagcggctctgcagcgggatctcgttggcgtgcagacggatgatgatgccctcctgactgctcagcagcacatcgtccacgtcatccacgatcttcacggcggcaaccttgtcgcggctcacatcgtagttgcggatgcccttgccgccgcgggcagtgatgcggtaggtgtcgatatcggagcggcgtcccttgccgttctcggtcacggtcagcaccgtgccgccctcgcggcagatgcacacgccgacaacttcatcgccctctgccagacggatggcgcgcacgccgtggccgttacggcccatcgggcgggcatcctcctcgttgaagcggatggcctgaccgttgcgggtggcaacgatgagcatatcgtggccggaggtcaggcgggtccatgccagcgcatcgccctcgttcagggcaatgccgatcaggccgctcttgcggatgttggcgtactgttccagcggggtgcgcttgatgagaccctgctttgtgaccatggtcacatagccgcccgactgctcagcgtccttgctctggcagatcatgttggtcaccttttcgccctctgccagctgcagcaggttgacgatgttcatgcccttgctggtgcggctgccctcggcgatggtgtagcccttaatgcggaacaggcggccccggtcggtgacaaagagcacatagtcatgggtggagcctacgaacatctcctgcacgatatcctcttccttgcgggtcatgccggaaatgccgcgtccgccgcggcgctgtgcctgataggtggccttgagctgacgcttgatataaccggcctcggtcagggtgtagacacactgctcctcggcgatcagatcctcgatatccacctcaccggtcacggactggatctcggtgcggcgctcgtcgccgaagcgcttcttcatttccagcagctcgtccttgacgatggcaagcacccgggcgtcatcggccagaatagcttcccagtcctcgatcttggcctgcaggccggccagttcttcctcgatcttcaagatctccagaccagccagacggcccagctgcagcttgacgatggcgtctgcctgcgggtcgtcaaagccgaactgctccatgatggcagctttggcttctgccatgccgcccttgcaggcgcggatggtggcgatcagctcgtccacgatatcggtggccttcttcagaccttccagaatgtgggcgcgctctttggcctttttcaggtcgtactgggtgcggcggcgcaccacctcatcctgaaactccacatacttctgcagcatctgcttcagggtgagcaccttgggcaccttatggtcgatggccagcataatgacgcccacggtgtcctgcagctgggtgtactggtacagctggttcaggatgacctgtgcattggcgtctttgcggacatccaccacgatgcgcatacccttgcggttggtctcatcgttcaggccggtgatgccctcgatgcgcttttccttgacaaggtctgccatgtgctcaatcagacgcgccttgttgaccatataggggatctcggtaatgacgatctgggtgcggccgtttttggtctcctcaatggtggcgcggccgcgcagggtgatcttgccgcggccggtggcgtaggcggcgcggatgccgctgcgtcccatgatgatgccggcggtggggaagtccggtcccttgatgtgctccatcaggccgggcaggtcgatgtccgggtcatcgatataggcgatgcagccgtcaatgacctcgctcaggttgtggggcgggatgttggtagccataccgaccgcgataccctgactgccgttgaccagcaggttcgggaagcggcagggcagcacgctgggctcctttttggtctcgtcaaagttggggtcccagtcgatggtgtccttctcgatatcggtcagcatctccaccgccatgcggctcatgcgggcctcggtgtaacggtaagcagccggggggtcgccgtccacagaaccaaagttaccctgaccatccaccagcggatagcgcagcgagaaatcctgtgccagacgtaccatggcgtcgtagaccgatgcgtcgccgtgggggtggtaagagcccagcaccgcaccaacggtatcggcagatttgcggtatgcatggctggggtcgttgccgcgctcatgcatggtgtacaggatgcggcggtggacgggtttcaagccgtcccgcacatcgggcagggcgcgggacacgatgaccgacatggaataatccaggaaggccgtttcgatctcctttttgacgtcgcggatgatctttttggttccgctgcccggtatcatcacataatcttcttccatttgttcctccgtgtcttacacgtccagctttgcgtactgggcgttggtctcgataaagcggcggcggggctccacctgatcgcccatcaggatggtaaaagcttcgtcagccttttcggcatcctcgatggtgatctgcacaatgacccggttgtccgggttcatggtggtctcccacagctgttcggggttcatctcaccaaggcccttgtagcggttcacctttgcgccgggcatctcctgcgagaggatggccatttccgcgtcgttataggcgtacttgatggtgttgcccttctgcaccttgaacaggggcggctgtgccacatacacatgaccctgctcgatgaggggacgcatatagcggaagaagaaggtcagcatcagggtgcagatgtgggagccgtccacgtccgcatcggccatgatgaacaccttgtcgtaccgcagcttggagatatcgaactcgtcaccgatgccgcagcccagtgccagcaccaccggcatcagcttgtcattgccgtaaattttatcggcgcgggccttttccacgttcagcatcttgccccacagcggcaggatggcctgaatggcagagtcgcgtcccatcttggcagagccgcctgcagagtcgccctcgacgatgaaaatttcggtgcggctggggtctttttcgcggcagtctgccagcttgccgggcatccggctggtctccagcgcgctcttgcggcgcaccagttcgcgggcctttttggcggcggcgcgggcgcgggcggcctgcgtggccttttcaaaaatggcctttgccacgccgggattctcctcaaagaactccatcagcttggagtagaccatgttggaaacgagggtgcggatctcggtattgcccagctttgccttggtctggccttcaaattcggcctcctgcagcttgaccgagatgacgcagatcagaccctcgcgcacgtctgcgccggacaggttctcgtccttgtccttcagcagaccgtggctgcggccgtaatcgttgaacacgcgggtcaggctggccttgaagccctcttcgtgggtgccgccgtccggggtgttgacgttgttggcaaagctcagaagcagctcgttgtagctggaattgtactgcaaggcgatctccgccacgccgcggtcggtctgccccttgaggtagatgacattggggtgcagcacttccagcttgcgcttttcgcccagataggtgacaaagctcttgatgccgccctcgtagcacatcacctcggagcggtagcaggggtcgccctcctgaccgtcctccagcacgggggtgtacagctggcgctcatcggtcagggtgatcttgacaccggcgttcaggaagctttcctcccgcaggcgcttttccagcgtgtcgaagtcgtagacggtggtgtccttgaacatctccgggtcgggcttgaaggtgacccgggtgccggtgacgccctcggctaccgtgccgatgcactttagtgcgccgtccgggtcgccccgccggaaggtctgctcgtactccttgccgtcgcggcgcacgttgacggtgagccactcggagcaggcgttgaccaccgaagcgcccacgccgtgcagaccgccggccaccttgtagccggaattttcgccgccgaatttgccgccggcgtgcaggatggtgtacaccacggtgacggcgggcagaccggtatcggcctgaatgtccacggggatgccgcggccgttatcggtgacctgaatgatgttgtccttcaggatcttgacctcgatgtggtcgcagtaaccggccagcgcctcgtcaatggcgttgtccacgatctcgtacaccagatgatgcagaccgcgctcaccggtggagccgatatacatacccgggcgcttgcgcaccgcttccagacccttcagcacctgaatttcgctggcgttatactcgtggtcggtcgcggtatcggcatttgtactggtaatgatttcttctgccatatcctttctcccttttgttcatttttgcgtttgttttttcaaattatagcaaagcgggaaccggtacaccatggtgtacttttttctcgccgttttgttgtgttttcacgcgctgcccgcagcgggcgttccggctggcacggtgcggctttccgggcagttccggggctttcccatccctcttttttctgtggatcttccgcccgttttccgcaaatttcactccaccatcttttgcgctctgcggcgcatggcggcgctggacaattccgaaagatacaccgcatccaccagccctccgtctgccagcacatagcactggggcagctcgtccgaaaggctgaccaccgccccgttcttctgggcgtagttcaaaaactcccgcccccggggggaggtggtggtggtctccagatcaaagatgccaatgatatcacggtcgttcaggacatagtcccgccccagatgaatatacatactgtattttctcccgcgtcttttgtttgcataaagtccacgaaaattcagcttttatgcagtattgcttacaacatttctccatgctgtcagacccggctcagcaccccgccgtccatgcggtatacctcgccgtcggtctttaaaaagtccgtgtcatcgcagctggtcacaaaggtttgcttttccttcatgcaggtgagcagatactgcttgcgcccttcgtccagctcgctcagcacatcatccagcagcagtaccgggtgctccccggtgatctgcgccgcggctgcggcttccgccattttcaggctcagcaccacgctgcgctgctgtccctgactggcatacacccgggcaggctgttcgtccagtaaaagctccaggtcctcgcggtggatgccgcacaggctctgcccggcgcgcagttcttcctcctgccgctgacgcagcaggtcggcaagcccgcccggcgcaaactgggcggcatagcggatgctcatccgctccgccccgtgggaaagctccgcgtagttggcacaggcgcggggagccagcagtttcagatactccctccgccgctgctgcaaggcttcgccctgtgcggcaagctcggtgttgagcacctccagcagggtgcgcttttccgcataggggcgctcctgcccgtttgcagagtggcgcagcagcgcatttttttgctgcaatacccgcacatagcggcggtagcttgccagatacccggggtacagctggcacagcgcagcgtccagaaacttgcgccgcccctccggagcccccttgacaaggctcaggtgcccggggtcgaacaccaccgccggaaagctgcctgccagcgccgccgcccgcttgggcgctgcgccgtttaccgccgcatagcggccgggctttgcggcttccggggtgcccacggtcatgcggatgtgggcaggctcggcgggctcgcagccctcgggccggtcccgctgggtgtcggcttccagcaccgcaaatgcttctccccggcgcacaagctcggcatccttaccgccccggaagcttttgccgccggtcagcagccagatggcttctaaaaggttggtcttgccctgaccgttgttgccgcagatgacggtaagttcccgcccgggctccagccgtgccgcacaaatattgcgatagttctgtacttccagcgaaagcagacgcatttactgaccctgcccgatctctacgctctgcccgtccagctcgatgacgtccccggcgcggcactttttgccccgcatggtgcacacctcgccgttcactttcacagcaccgccctgcaccagctccttggcttcgccgccggtctcgcacaggccggcaaatttgagcagggcatccagcttgataaactcggtatgaataagaatcttctgcataaaacgcgctccttagtcgtttttaaaccgtaccggcagtaccagatacaggaaatcgttgccctctaccggcagcaccttcaccgggctcaacgggccgctgatctccatgcgcacctgctcggtgcgggcgttgcgcagcgcatccagcagatagcggttgttgaaaccgatctccacctcatcgccctcgcaggcggcgctgaactcgtccaccacgcggccgaggttggtctggcagcgcaccacgactttaccctctgtaaaggagatgcggaggggattttttaaacgctctgtaataatcaaggaagcgcgctcgatggtggagataaaatccttggtgtcgatggtcacccgggtgcggcttccggcggggatgacgttgcggtaattcaaaaactcgccctcgatcaggcggctcatgatggtgtaaccggcggtggtgaacaccacatagcggcggtttgcactgatgtgcacgtcctcctcgtcatcgttggccagcaggtgggacacctcggtcatggtcttgctgggcacgatgatgcggatatccttcacggcggtgatgggccgctccacgatggcaaggcggtagccgtccagcgccaccatggtcagcttgtccagctcgatctcgaacagctcgccggtgtgggcgggttttttctcgtcctgactgacagcgtacagggtgcggtcgatcatatcccgcagcacgccggtcttgatggtcagggtctgctccgcgccggtgttgggcagatccgggaaatcggtggcgggcatggactggatctcgaactgtgccacgccgctctggatggtggtcttgccgttatcggcagccacgatgctgatctgacctgccggcatccggctgatcatgctgctgagcagctttgcattcagcacgatctcgccgggttctttgatgttggcttcgatggtggtcacgatgcccatttccagatcgtagccggtcagggtgagctgaaaaccttcggccttcagcagaattccctccagcaccgggatggacgagcgcatggtgacagctttggaaacgccgtcgatggctgcactgagcagtgttttatcgcagacgatgttcaaaacagtatctctccttttttcacacttccggcggaatatctgtcctttgggctgctgccggaaggcagtaatatattgaacttgttgtagtaaccgtagtagggggtggggaagatgttgaaaacccggaaatgtcttgccgggaagcggggctttggctttccaccgggttgtggaaggctcgtgaaggaaatgttgaaaggtggggaacggtgattctttccacagccgatgtgaagaactgatgttaaatgttgaaaactaggtggaaagtgtggaaagcttcgcctttttgccacaagatataggcgtattttcccctttttgttccggtttctccctatattttggggtcacaccctaaaatgagtatgacttttgctcagttttccccggtttaagctttcacgttcttgatgatatcgctcacggtctcccgcagatgctggtcgttcttcatgtcccgctccatggtcttgagggagtagacgatggtggagtggtcgcggccggagaattcccgcccgatctcctccatgctcatgccggtgacttcccgcaggatatagatggcaacgcgccgggcggaagccacattggcgttgcgcttggtgccccggatgtcggcaggggacacgttgaaggtgcgggacacctcgccgatgatcttttcgatggtcaccggcaccggctgggtctcgttgaggatatccttgatggcgttctgcgccacgctgatcaccggctggatgccctccagcatataataggcgttcagctttttcactgcgccctccagctggcggatgttgtttttcaggtggttggcaatgaactctgccacgtcctcgggcagatccagatgcagcagctctgccttgcgcttcacgatggcaacgcgggtctcaaaatccggcggctgcacatcggcggtcagaccccactcaaagcgggtgcgcagacgctcctccaggctcttgatctccttggcggggcgatcggaggcgatgacgatctgcttgtgggcatcgtgcagggagttgaaggtgtggaagaactcctcctgtgtggactccttgcccgcgatgaactggatatcgtccaccagcagcaggtctgccacgcggtacttcatgcggaagtcctcggtgctgccggcgcggatggcggcgatcagctcgttggtgaactgctcgcaggtgacatacatgatgacgaaatcggggtgggtgcgcttgatctcggtctgaatggcggtcagcagatgggtcttgcccagaccggagccgccgtagatgaacagggggttataggccccggaggggtttgccgccacagcctgcgcagcagcaaacgcaaactggttggacggccccttgatgaagttttcaaaggtgaattcgtagttgccctgcggggaggcggggtttgcctcgtactgctgggccagcactacttcgtggggcggggtgctgggcaccacaagggtgatgtccacatcaaagcccagcacggacttgaaggcctctttgagcaggccgagataccggtcggtgacgatcttgcagataaaatcgttgcgcaccgacagggtgatatggctggagtcctcaaagctgatgggctccaacccgtcgatatagagattgtacgttggctcggccatctgcgccttgcagtacatctgggccgcttctaaaacgtccttgaaagaatccataaaacatccactccattgaatcggtcgaagttttcaacaatgctgctgataccacgttagtataccacaaaaatctccctgcgtctatattactataatgtaatttataatacataagataagcccccgcagcgcccttgtggaaacacgcccaaaagaccacaatatctggtagaaaaaagttttccacagcaaaatggtgaaaaagttgaaaagcttttaacagaaaaatcagaaaaaagtttgcagaaaactgcaaaaaatgcttgacagaacgtcatactatgcgatatactgttgaattgcaagcctgtccccaatctgggaccgatcaagaccccataccggggataagtttttacggaggatacaaccatgaagagaacttttcagcccaagaagcgtcagcgcaaggaagttcatggctttctgacccgcatgagcaccaagaacggccgtaaggtcatcaatgctcgccgtgcaaagggccgcaagagcctgactgtctgatctctgccttgcaggtgagatccggcgcagaaatgaatatgcgcacaaaagaccgctgatatcccattggcggtcttatttttttacccgtcaaaagttttttcgtaaaaatgcccggatgggcttttaaactgcaaaaatttttgatatactggctaaagagtgcacctatgtgcacccggacgaaaggaggtgccgacgttatgcgttatcgtccgatccgccgcaacagcgagtttggccgtgtgtacgcccgcggcaagtcctatgtgaacccggcactggtactgtatgtgctcaagacccgcggccgcaacacccgggtgggcctgaccgccaccaaaaaaataggccacgccgtgcagcgcaaccgcgcccgccgcgtgatgaaggctgcgattgacgagcatctggatcacaatatcggcggctacgatctgatcttcgtggcccggggcatgacccccaaactgaaaagctggcagctgagcagcgttgtggcaaagctgtttgcacaggccggtctgccggataaggcaaagcgcccggacgcaaagccgcccgccaccgtgccccctgcccgcaaacaaaagccggagtcccgcgcgtgaaccggctgcaaatgctctgccgcagggcattgtgcgtgcccatccgcatctaccagtacaccctcagcccatggatcggccgcagctgccggttttcgcccagctgcagcaactacaccatgcaggccatcctgacccacggctgtgtaaaaggcattttgctgggcgcatggcgcattgcccggtgcaatccgctgggcaagtggggctacgaccccgtgccgccgcccggccgctggcaaagccccgcccggaatcttcagcctgcaaagctgtttgaaaagcggcacaggggataaagttttcgcttcttgtgacgcgctgcactgtgggcggcgtgtcctacgataaaaaaataatgcgtcccgggccacagccggggcagaatggacaaaggtatgaacttcttttacatcctgagcggtcctctcggctatgtcatggagtggatctacaagctgctgccgaactacggctgggacatcatcctcttcaccctgctcatcaacatcgtcaagatccccctgcagaccagccagcagaagagcatggcgaaaatgtctgctttccagcccatgatcgcggagatccagaccaagtacaagaataagcctgaaaagcagcaggaagagctgatgaagctgcagcaggactttggctataagcccacggccggctgcgtgcccatgctgctgaatttccttgttatgttcggcgttatcggcgtggtgtataacccgctggagcgtattttccacatcagcgccgctgcacttgccagcgcaggcgaggctatgaccgccgccggcatctcctttaccgccatcacccgcgataccaacatcatcgccgaggtggttgccggcaacagcggcgtgctgggctgctttaccgcacagcagatcgctaccatcaccgagttcagccagcacatgaacttctttggcatcgacctgacccgcatcccgaagctggggctttctctggatctcgtgctgccgctgctgtcggtcattaccatgttcctgtccacccatatcagcatgaaggcctccggccagcagatgcagggcagcatgaagctgaccatgtatatgatgccgctgatgtacctgttcttctgctttaccttcccgctggcatactctctgtactacgtcatttccaacatcgtcatgaccgcacagactcaggtcatgcgcaagttctacgaccccgagaagatgcgcaaggaagtggaagcggagatcgccgcaaagcgcaagcaggaaaagcgcggtgtgaagaacaccaccatcacggtgaccgaccccaagaccggcaagagcgtggaaaagaacctttccgccagcgagatgaacaagcgccggctggagtatgcccgtcaactggacgccgagcgctacaaggacgagcgcaccgtgccgctgagcgagcttgacaagcaggataaacagtaataagggaggtaaacggttatgatccgtacacaggaatccaccggcaagacggtggacgaagcccgcgccaaagcctgcgccctgctgggcgtgcaggccgacgatctgaatgtcagctatgaagtgctggaaatgccccaaaagaccggttttctgggcttaaagaccacccccgccaaggtgcgcgtgcgcgtggaagagccggatgcccccgccgctgcacccgcaaagccggtggcagagcagcctgttgagactgccgcccccgtgcaggagactgctcctgtggcagaggaaacgcccgctgctgtggcagagcctgctgctcccgccgcagagcagacccccgctgcccagcagtccgccgaagctgccgaggaggcagaagaggtggaagtgcccatcgtcatcgaggagaacgccaaggtgaaggccgctgtggactatctgcgggaagtcatcaccctgatgggcgtggagaacgtgaccttcagcgccgtgcagaagggcgaagccaccatcatccgtctggacggtgaaaagctgggtgccctcatcggccgccgtggcgagaccatggagagcctgtcctatctggcaagccttgtggcaaaccgtctggagggcgattacatcaagctgggtctggacgttgccggctaccgcgacaagcgcgagagcgatttgaccgcactggcacagcgcattggcgccaaggtgcgcaagaccggccgcagctttgccatggagcccatgaacccctacgagcgccgcatcatccactctgccatcagcaagatggagggtgtgcgcagcgagagcaagggcgagggccgtgaccgccgcgtggtcatctactccaccgcaccggatgctcagaccgagaatacctacggcgagcgccgtggccgtggcggcaaccggaatggccgccgtcccggcggcaaccgcaacggcggttatcgcggtgagcgccgcagcaatggcggctaccgtggcaaccgcagcggtgcaccccgcggcccgcgtccgtccagcgtgccggagcgcacctacgccccccgcgacgccgagagtgcagcacccgtagcacccaagcgcaccgagcgcgtggacgactttgcagatttcagctttggcaagatcgagctgtaaacggcaggtttcaataaaactatgcagcgccccgcatttccactggaagtgcggggcgctttttgatattatgagcgcacgccgagggatg

SEQ ID NO: 13814 - DNA, 1543 bp, Unknown
  gut microbiota DNA sequence
catattcagcggaaagaatcttatttatagaacaatgccgggcagactgcggtctgcccggcattgtattttcacgagaggggtcgaagtggagaacggcagctgctgaaaatcgtcttacttcaaagttccgtccagtacctgctggtaataccacggcttcggggcgtggaaggtcttgccgctgaggaaggcaaagtccggctgggtgaagcggggcatggtcagttcccatgcgcatagtgcctgatacttcagcttcagctcccggttggcgctgttgttgccatacttgctgtcgccaaggatggggcagccgatgctggccatgtgggcgcggatctggtgggtgcggccggtgatcagctgcaccttcagcagagccagacggccggagacggcgatggtctcgtaccgggtctccacctccttggcaccgggctgcttgtcctccacgatcttcacgatgccgcggtcagcgtccttcagcagatagccgcccaaggtggcgtccggcggcatgggacggccaaaggtgacgcagaggtaggtcttttgcacctcacggttcttgatggcggaaaggaacagctcctcggcctccggagttttggcaatgatcacaaggccgctggtgccggtgtccagccggtggcacaaggcgggggtgtacaggtcgttctccttgtactcaccctgcttgttcaggtacagcagcgcacggttcagcagagtatcgtcctccgggccatccaccgcaacaccggcgggcttgttcacaatcaggatctgcgggcagtcgtacaccacctgtgccggggtgcgggcgttcttccacgcggggccttccacccgacggtcggcgtccagcacatcgtctaggatgaacagcttgatctcatcgcctgccatcacgcgggtggaaagcggctgttttttgccgttcagcttgatcttgttttcccgcagcgccttgttcaggcggccgggggtcagggcggggtactgctgggtcagataattgtccagccgggcgggggcaagacattttacttttaaaattttcacgggaaattcctctctatcttaaaatcagtcgcaatagaatgggttcttgattcgtttttattgtagcggaacggaaacgttccgtcaagcaagagaaagaaggttttcgtatgagatggaaccataaaatagtgacacttactgtgcttttggctattggaataacaatggtgggctgtggggcgtccagttccacggctggaagcacagcggcttccacggcaagcacgacatcttcggaggcgcaaaaaacggaagtacacccaatgcaaggtgttttactgagtgacccactttcggatggcacttatcacatcagctttgaaagcgataaagtatgggtcggtgaacgcaagaataccatcaacaatgctgttgtatacgactatgaccggtacacagccgcagatattgaagcattgagcgaaggagataccattataacacatctaaacgggacagaagaaattacagc

SEQ ID NO: 13815 - DNA, 8188 bp, Unknown
  gut microbiota DNA sequence
ccgtgtttttccaacacgaaaataggttccgttacaagttctttcgatattgttcaattttcaaggtcctgtgcgccgcagcctcaacggttgacagcttagttattttatcactttcgtgataaattgtcaagcacttttttgaaagatttttgagattcatttttgattctgtcgaatctctccgtttgacgtcgtttttgaagtatttcattctgtcggacgtccgcctgacagtaatatattttagcacagcatccttcaaaaagcaagctttttttacaaattttacgccaaaatcattcttttgactttttgcccagttttttacattttttatagacacttcctcccttattcctccaaaagccgggcgcgcagccggatcaggatcttgcgttcccgccgggagatctgtacctgtgtagtattcagtgcttttgcagtctcgctctgggtgcggttgccataaaagcgcagacgaatcagctgcttgtcctgctctggcagcgcttcgatcacctccgccagactgatccggtctgccagttcctcctccggagattccaccgggatatccagctgccggtctccatcctcgccgccctccggggtcaggctcatggcgggctgcgcggcctgtatggctaaagccacattctctatcggctcatccagttgttctgccagctgctgcaaggtaggctctgagccgcacagcttcatagtatgctcccgtgcagcttgcacccgcattcccagttccttcagggagcggctcaccttgaccgtgcccccatcccggaacagctttttgatttcaccaaggatcaccggcacggcataggtggaaaagcacacgccccggctctcgtcaaaattatcataggctttgatgagccccacgcagcccgcgctgtacaggtcgtcatactccatgcctcgcccacggaatctgcccgcacaggcgtgcaccagccccagattctgcgtgatgaatgcttcccgccgggtcttatccgttaccatataccggaccgcctttcctttttatgtaggctcccgccgggacaaacgcttgactagcagcacccttgtacctttaccgggctttgaggtgaccttgaccctgtccataaagctttgcatcaccgcaaagcccagaccggagcgctcttccgggttgccagtggtgaacaacggctgcatggcctgctccacattggggatgccaatgcccttatctgtaatggtgatgtgcacctcccggtcggggtagaccgcaatggtcatgcacaccggcccgatccgctccgggtaggcgtggacgatgcagttggtcaccgcctcggacactgcggttttcaggtcggccagttggggcacggttggatcataccgcgccagaaaggccgccgtaacgccgcgggcgtaggcctcgttgctgctaagggaatcgaactggatgcgggtgctgttctctgctttcattgcgcattctccttttctatattctccgtacaggggatgcccgccagccgcaggactttttgcagctgcgcgggggcgtgctgcaaccgcaggctcgtgcccagaacgcgggcgcagcgctgccgccccagaataagtccgatgccggaggaatccatgaaccccaccccgccaagatcgataatcaagatgcggggactgcggctgaccagtgcatcgtccagctgcatccgcaggctctgggcggtatcgtggtcgatttcccccgccagataggcatacagggtctcccctgctgcgctgaaagtcaccgttgccattgcttgtccatctcccttttttttgcaaaataaaagatcccgtacacataacttcagtgtacgggatcttcgagttattttttagaaaaagctgtcggcagcttacgcctttgccagcagagcggccgcttccagcgctgccgcctcgctgccgcagaccaacagcccgcgacgggtgttggcgtgcgccagctgcaccgcctcgtccagactggtgcagagctgggcgtcaaagtgatactttgccttctcggtcagacgccgggtcagctgctcctccacaccggcgggcgtgacgagatacaccttatcaaaggggctctcgctcatgccgggcatggtggatttatcctttttctgctcctcagggctcaggccggtctccagcgcggagaagaaggcctcggcaccctcttcctcggtcaggccgatgatagcgctcatatggcgcaccttggccatgttcaacacgcgcagcagcgcggcagcctgctgcggggtgcggcaggcatccagaatgaccagcgggcgctgggaaagcacccgaatgctgcaacggttgtccacggcagcaatgccatccagaatggcttcatcggagatgtccacctctttgcggcagagcgccagcgccagctccaccgccatggcggcgttgcctgcggcgtgacgccccagaaaggccagcggcactgtgtagccgccgtagtccacccggctggcaaactgttctgcttccagaaaggtgatatcctccggatcgggcactaccagctcacagtcgcacttgcccgcagccacaaccagctcactgagcaccgccttgggctgctccggcgcggtgacgcagatgctttccttgcgcatcacgccgcctgccaatgcagccagacgttccaccgagcggctcacgccatccggtcccaccgctgtgacggcgcacaccggcatttttggcagcaccgcagccagacctgcatccggcagctctactaccgccagcgtgcagccggcttcgccaaagcagtacgcagcggcaacaagctctgccgcctgcaaaggcagctcctcatgggcagcaagggcatcggcggcgcggcacagcagtgcttcgtccaccggcttgccatccacacggatgcgggcagcaagcggctcgcacccggcatggtagacaccggcacggatcccctgcgcgtgcagaatggctgccagcagacgcgccaccgccgttttaccggcagtgcctgccacacccacgaactgcacctgctgcaccgaggcgggcagcagtgcgcccagctgcgccgggtcggcaaagccgtccggcagagctgcaaaatactgatttgcctgttggatggtcattcgtgtctcctttttatgtgataatacagtccctcgcaggccaacagcagtacgatggcaacaaggatgccggccagaacaccggcagaatccagccacacatcggtgacttgactgctgcgtccctccgagaagagctgaatggtctcatcggtcagcgccgtcagcacaccgcccagcatgggcacggtgatatgccgcagcgggtgacggctgtacacccgcatacagagcatgagcagaaagccctccagcgtatactcgcaaaagtgtgccagcttgcgcacgatatgcatggtcagatgctctgccagccccggctgtcccaagcggcgcaggatgatgcgcatccacgccagcacccggccgctggagtcggtggagaccgttgccaccgccatggagttggaaaagatgaaccagatgcaggcgatgagtgcaacggtaaagaccacacgtcccgcaatgacccacagtgaggtgcgttccgtatcgttatagcgttccacagtctcagcccagagccttaatgctctgctcgatgttggccagcttgtcctgactcttggcgaactttgtgcggatctcctccaccagagccgccggggcacgctccacaaacttggggttattcagctggttgccgaacatggccatttccttttcagccttggccttttccttgttcaggcgagccaattctttctctcggtcgatgagctccatcatggggatgaagccgcgggcggcgtgggtggacacctgcaccatgccatcggtgctgccctcgtacttttcggtaaaggtcacatcggtggcaaaggcaaacttggccagatagacctgtgcgttctggaagggggctgcatcggcagtttcaatgatcatgctggtcttttttgcggggtgcacgttcatctcggtgcgcatggtacgcacagccttgatataatccatcaccttttcaaaggcttcctcttcagcggcccagttgtgagcggcgtcaaaggttggccatgcctgcgtcatgatggtctcggcagaaccgggcagagcctgatacagttcctcggtgatgaagggcatgaagggatgcagcagcttgagcgccttatccagcacatacaccagcacacggcgggcggtgtcggcctgctgtgcatcgccggagttcaggcggggctttgcgatctcgatgaaccagtcgcagtagacatcccagataaagctgttgatcttggcagcagccagacccatctcatagtgctccagattgtcggtcatggcaccggccatctgattcagcttggtcagcacccacttgtcgctcatgtccagcagctcttcactgggcagacccggctcaaagtcctcgggcaggttcatcagcacaaagcgggtggcgttccacagcttattggcaaagttgcgggcagcctccaccttcttttcgatatagcgcatatcgttgcccggggtggagccgtccaccagcataaagcgcagggcatccgcgccgtactgggcaatgacctccagcggatcgatgccgttgccaaggctcttggacatcttgcggccctgactgtcgcggacgatgccgtggatgcagacggtatcaaacggagccttaccggtgtaagccagaccggagaagatcatacggctgacccagaagccgatgatgtcgtagccggtgaccaaggtgttggtggggtagaaatacttgaggtcggcgctttcctcgttgggccagcccagcgtgctgaagggccacagcgcagaggagaaccaagtatccagcgtgtcggggtcccgcgtcagctttgcgctgccgcacttggggcaggtgcagggagcggactttgccaccacggtctcgccgcagtcgtcgcagtaccaagccgggatctgatgaccccaccacagctggcggctgatgcaccagtcacgggtgttcttcatccagttcatatagttcttggtaaagcgctcgggcacaaacttgatctcgcccttctccacgctctcgatggcgggctttgccagcggctccatcttgacgaaccactgcttggagatcatgggctcgatggtggagtggcagcggtagcaggtgccgacctcgtgcttgagcggctcgatctccttcaggaagccgccttccttcaggtcggccagaatggccttgcgtgcctccagcgtagtcatgccggcatacttgccgcaatccagcacatggggctcgttgacggtgttcttaccggcggcaaacagggcatcggcggcagccttgtcggcagcgccggtcatgtggccgtcgtaggtgaacacgcgcacgatgggcaggtcgtgacgcagaccgacctcaaagtcgttggggtcgtgggcgggggtgatcttcacgacaccggtgcccttggtcatatcggcgtgctcatcgcagacgatggggatttccttgttcagcaggggcagcaccacatggcagccgtgcagatgggcgtagcggggatcctcgccgttgatggccacggcggtatcgcccagcatggtctcggggcgggtggtggccagttccagcatctcgccggtctccttgaccgggtacagcagatgccagaagctgccgtccttctcctcgtactccacctcggcgtcggaaatggaggtgttgcagtgggggcaccagttgaccatgcggttgccgcggtagatcagtcccttgtcgtacaggcgcacgaacacttccttgacagcctcagagcagccctcgtccatggtaaagcgctcgcgctcccagtcgcagctgctgcccagcttcttcagctgactgacgatgcggttgccgtacttggtcttccatgcccaggcgcgctccagaaaaccatcgcggccgaccatctccttggtcaagccctcggcgcgcatagcctccaccaccttggcttcggtagcaatggaggcgtggtcggtgccgggcacccacagggcggcatagccctgcatccgcttggtgcggatgaggatatcctgcatggtattatccaccgcatgacccatgtgcagctgaccggtaacgttcggtggcggcatcacgatggtataaggtttcttgtccggatcggccttcgtgtggaagtagccgccgtccagccagaactggtagatacgatcttccacctgactgggatcgtactgctttgcaagctctttcatagtgtcctccaaaaaatttgatgaagtgggacgcaaaaagccgccccacggagcgttccatgggacggctgtaaatacatgaccgcggtaccacccaaattgcgcggaagcctccgcgccccttgatgcccctgtaacgtagggcagacccgaaagcggcttaccggcaaggctcaccgctcctgctccaaagtgacagtgccccgccggtatcccgccgggttttcagctgcccccggctctctgtgcggctccagacgatgcacactctttttcaacgcatttataaaaagaatataacgttttttgtgggatttgtcaatcagtttttcaaacctttcacccaccgcaccagcttccatacctttgcgccaagatgtgggcagtaacccatcatcagcgcctgcagcttctggcttttgtgctctgacggaatcttccacgcagcgcggcggtgcgtggaagccagctccagcagtgttttttccttttccgggtcccgctccggctggttgaccagacggaaatatacctcggcgcaggacatgatgcagcgctgatccgtagtactgcggaagggatccggctgcccctttaccagctgccagatctgttcccatgccagtgccgccgtgtaaaagcgcaggctcggctcctgccgcacggcagagcttggacgttcaaggtaagcatacagcgggcagttcaaaaatgccagactgcctgccttgaggaattccgttacaaagaacagggcatcctccccgtagaacagcgccgggtcaaagcggacatcctgcagcacctcccggtgggtcagcatccgccagcagtgcccgccgctccattcctgcatccacgagtagttttccgtcgtgattttctgcggtgccgggcactccgtcaccgtccacagagtctcgttttcccgtatgctgcggtagcggcacatggcaatgcgggtaccgcagctgcacaaagcatcgtacagccattccagatactgcggcagcacaaggtcgtcggaatccacaaagcagatatactcgccccttgcctgctccagcccaaaattgcgtgccgaggacaccccgccgttttccttgcggaaaatacacacccgggcatcctgtgccgcatactgctgcaaaatttcccagcatttatccggcgaaccgtcatccacaaggagcagttcaaaattctgatacgtctgcgccaacaagctgtccagacatgcaggcagatacttttccaccttataaaccggcgcgatcaccgagatcaagggctgctcctttgcgttcattccgctctccttttcaatatcttcagtccgcgctgcctcagcgtatcatattcttcgctgccacggtagaacagtacgatcactcctgcgaacacagctgtgtaaagcagcccatccagaataaaaataccgaaattgcccaccgggaaccgctgcacccacagcaccgctgccgcagagaccgctgctgtaaggagtgtgcgcttcagatactctgcaaaataatcccgaagtttcttctgccatgcatcctgaacgccatacttcaaaaagatgtagggttctacccaggcacaggtacacagcgtgctgatgatggtgccccagataatgccggtcacgccgtactgccgcaccagtacaagcgaggccaccagattgatgatggattccgccaccgctttgtagcggtcgttccagaacagccccatggcctcccggaacagcagattcgtctgccgcattcgtgtaatgtaaaact

SEQ ID NO: 13816 - DNA, 9647 bp, Unknown
  gut microbiota DNA sequence
ctagagcctctgcccttcctcctccaccctgcggatggcttctttaatggtggggtaggcaaagccgcggcgctgcagcgccgccaccacaaggtcgcgacggccgatagcaagctttttgcggtagcggctgtccaccagcgcggcggcggcttccagctccgggtcgtcgccgccgtcctccggggcgtagaccgcttccagcgcacctgccacctcggcgggggcaagccccttctggcgcaggctctgggcggcggcgcggcggcttttgcgggcagccagcaggctgtgcgcccgtgcttcggcgtagcgggcatcgttcacatagtccagctgcaccatctccgccacagcggcagcagcagcctgctcggtatagcggcggcacagccgctcatacagcatattggcagagacctcctgcccggccagcgtttccagcgcactcgcccgcgccttggcggggtctgcacacttttccgcatccgggcggggtcggcggcggtagaaggccatttagtcctccaccatgatatccagctcgctctcgctgctgcgggcgggtgccttgaccaccggctcttttgcggcggcagggtcggcgggcttctccgctgcggcggctgcggcgcggcctgccggacggcgggtggcgtacagcttatcggcgttggcgcggatctgaccctcgatgtcattggcgatctcggggttatccttcaggaactgcttggcgttgtcgcggccctgacccagacggatatcgccgtagttgaaccatgcgccgctcttctgcacgatgcccagcttgacgcccacgtcaatgagctcgctcattttggagatgccctcaccgaacatgatgtcgaactcggcttcacggaacggcggagccaccttgttcttgacgatcttggcacgggtgtggttgccgatgaactggccggaggagtccttcagaccctccacgcggcggatatcgatacgcaccgaggcgtagtatttcagggcgcggccgccggtggtcacctccgggttgccgtacatgacgcccaccttctcacgcagctggttgatgaacacgcagaccgtgttggtcttgccgatgacgctggtcagcttgcgcatggcctgactcatcagacgtgcctgcagacccacatggctgtcgcccatctcgccctcgatctcggcgcggggcaccatggcggctaccgagtccactacgatggcgtcgatggcaccggagcgcaccagtgcttcgcagatctccatggcctgttcgccggtgtccggctggctgaccagcaggttgttgatgtccacacccagcgcctcggcataggtggggtccagtgcgtgctcaacgtcgataaaggccacctcgccgcccttcttctgggcttcggcaaggatgtgcagtgccagcgtggtcttaccgctggattccgggccgtacacctcgatgatgcgcccgcgcggcacaccgcccacgcccagcgccagatccagccccagactgccggtggaaatggcatccacctgcatggaggcgttgtcgcccagcttcatgacggcacctttgccgaactgcttttcgatctgcgccagcgccgtagccagcgcatccttcttggcttccggctcggtcttttgggtagccggtgcaacgttgttgttctgattttttgccatagcctgctgctccttttatcctttgggcccgcagagggcgggctgtccttcgctttccttcttagtataacacaaaatcaaaatattacaacaagaagttgtttgttttttccaatttattttgcgcgatgagcgatcacgcagcggtcgttgccgccaaagtcttgtatgcagtggatatctgcccatccgttctctgccagcagggcgcttacagcttcccgctgctgccagccgatctccaacaccagcgccccgccggggcacagcgcattttggtagtgctgcgccagcgcccggtagaatacaaggccgtcctccccggcttccagcgccatagcaggctcctgcgccacctcgggctgcagccgctccatctcggcggcggtcaggtagggcgggttcgagacgatgagttccagctgcccctccggcagggtttcccagtaggtgaacaggtcgccctgcaccggctgcaccgcataggcaggcttttggtttgcccgcagtgcgttcagcgccgggccccaatcaaaagcaggggcatttgcctgctcaaaggcagagggttccagcacgttctcggtctgtctgccctgcccggtcagagcgcagcgggcgttcttttccagatagacaaaggccgcagggcttttttccacgcagatcacctgcgcggcgggacaaaagcgcttgacccccagccccagacagcctgtgccggcgcagagatccagcacccggggcgattcgatgcccgcaagggtctcggcggcggcctgtgccaccacctcggtatctgcccgggggcagagcaccccggggcctaccgccagctcaaaatctaaaaagctccagctgccgcagaggtattgcagcggctcccgcgcggcgcggcgggtgcagagcacttccagcgccgccgcctgctctgcggtcagcggacgatcggaaagccgcacgtcccgcccggtcgccagccggaacagctcccgcgcgtcaaaatccgcgtccgggcagcctgcggcggtcagccgctgttccacctcccgcaccgctgtgcgggggagcattgcttcgtttaccatttgccttcctccgggttttcgggcagcacgggggtgatggcggcaatggctacctcgatcatgctgtcgtccggctcaaagacggtaagatgctgcacccagatgcccggctgacggatgatgcgggtagcaatgttatccgaccggccgcaccacttgagcagctcgtagctgatgcccatgaccagcggcagcagcagcagcttgcacaccacccgcaggccgatgctgccccatggcagcacgctgtacaaaaacacgctgacgatgaccaccagaatgaggaagctggtgccgcagcggggatggaaacgggtatacttgcgcacattttccacggtcagcgggtcgcccgcctcgtagcaggcaatggtcttgtgctctgcgccgtggtactcgaatacgcgatggatctccttcattttagagatgcccaccatataggtcaggaagatggccaccttcagcaccgcttccagcaccaccttgctccagcgccccagcggcagcagacggttcaccccacccacaaggaaggtgggcagcacggtgaacagcaaaatcgccagcagaccgcccagcaccgccgccacggtcagcagcgcgttctcagctttttcgcccagatgctcccccacccatttttcaaaggcagtctcctcctcggcggggtcgtagtcgtcccccatgctcacctgtgccgagtacatcatgtagcggtagcccacgatcatgctttcgatcatggcaatggcaccgcgcaccagcgggatcttcatccataccccgtgggcgggggtggggtcgagcttggtctcaatggtaccgtccggcttgcgcacggcgcagcacatctgcttggggccgcgcatcatgatgccttccatcagtgcctgcccgcctacgctggtcttaaagcgttcctttttaggttgattcattggtttctcccgatatccgcccctgccgctttgggcaaagagcggtcttttttatattttatccggggcatatccccgagcaaagctcattttagcacacaaatgtgacaaaatctgtgttttggacgtttctcacgccttatggtacagcggcagacccaaggtgaccacggtgccgcgcccgagggtgctcttgatatccagcgtgccgtccagcgcggtcatgatggaatccaccagcgccagaccgatgccgctgccgcgcaccgagttgctgcccttgtagaacttggtctttacgttttccagatcctccggcgggatgccgcgtccctgatcgatgatctccacaaaggccttgtactcccctgcccacagtttgaccgtgatgcgcccgccgggggcagagtacttgatagcattgtccagaatattgatgaacacctgccgcagacggtccgggtcggcgtagacagggatcatctcctccggctcggcgtagtggagcagcagcccctcctgccggatgcgcgcctcgcagaagagcaccgcatcggtcagttctgccaccaagtccagcgggcggcactccatgcggatgcgtccgttctgcaggcggctgaaatccagcagctcctccaccatattgttcagccgcccggtctcgttgttgatgatctccagccccttgcggtagttctcgtcggtggggtcgtccagtgtcatcagggtctctacccagccccggatggaggtaagcggggtgcgcagctcgtgggacaccgaactgatgaactcgttcttcatcttctcggtctcttccagtccctcggccatctgattgatggtaccgcgcagccggtccacctcgtcgtgagggtcgccggtcaggggcagacgcacgtccagctcgccccgggcgatgccggcggcggtgcgttccacctgccccagcggcaccacgatgccccgcacgaagtacagcccggacatgatcgtaaacagcaagatcgccaccgcaaggaacacactgataatgatggcgtttttgacctgccgctccaccagcgccagactggtgaccagccgcagcgcggccacgtcctcggcgtcgtagggcaccagcgagcaggccgccatgactacctcgcccgactgggtgcggtacaccgccacacccagaccgtccgggccgttgagcgcctgctcaaagtccttactgctgacgatgccctccgcgtccgtaccgctggaggaggcaatgacgccgccgtaactgtccagcagcatgaactcgtatttatccttatcggcaaactgctccaccatgcgccgcagcgccagactgcggctggcagtggcgctctgggcggtatcgccggtatacattttcagctgaccggtcaccgaggagaaccgccggtacatgatctgctgcacactgccgtagtagctgcgggtatagctgtacaaaaacattgcctcggccagcagcaccaccagtacggtgatgagcaggttgccccgcagccagcggcgggtgataccgcttcgcataacagtgtcctcctttcggtgagtattgataataaaaagatatttttttgtgattcaggaaagtccgtaggacttttctgaatcacatttttattcttcccaccggtagccatagccccacacggtcatgatgtgggtggggtggctgggctcgtcctccaccttcatgcgcaggcggcggatgttcacatccacgatctttacgtcgccgaagtagttctcgccccagacccctttcaggatcttttcgcgcaccagcgcagtgcccgggttgcgaaagaacagctccatgatctggaactccacctgcgtcagctcaatgggctgaccggccttcagcagcacgcggcggttctcgtccagcacgaactcgccgctggtcaacgtgcccagtggggtgttcccgttgctgtcctcctccttggtgcggatcacccggcggcacagcgcctccacacgcgccagcagctcgctgacgctgaagggcttggtcatgtaatcgtctgcgccgatggacaaaccgcggattttatcctgctcctgccccttggcactgaggatgatgatgccgatctgctggtcggtgcggcggatggtctcgcacagcgagaacccgttcatgcccggcagcatcacgtccagaatagcggcatcacagccgggcttctgtgccagcagcggcagagcggcttcggcgctttcggcctccaccacctccatccccgcatggcgcaggttcagggcgatcatatcgcggatattggcttcatcttctacaacaagcactcgtaccatgcagcatcctccattccttaattcagcagatacaacgccttggaaaggcggtagttcgtgtcagaaagcaaaacgtccgggcccattctggcctgtacctgacgggacgctaccacgcccagccgggtccagccggtggagttggccgaggtccttgccagccgtaccgtcagcaccagctgatcctcgtccaccgtgcgcagctccactgcgccgtcaaattcctcgctgtcggtcagcttcaggttgccctcccactcggcgggcagctcgatataacagttggtctcttcgtccagtaggccaaagcttttttccgggtggctgctggtgtagtccatccagacgataaagtccatgcggcggctctggctcaggttcagcagacccgcctcgtccggctgggtggggatctccacgatgccgtccccgtccaagtcccggctgaccagcgtgggcacgttgcgcaaagaggcgttatacagccgctggctgctgatccgtgtggcgggcaccatctgctggctagtctcgtcgtagcacagcagcaccgaggccagattgttgccggaaatgccagtccagccgtccagcaccagatagtgccgtccgtccgcgcccgcgcccgccgccaccgaggcgcagccggaaaatttatctgcggaaaggccgttgaccgccacctgccggaagctgcccttgcggtctgcggtcagaagttcgatctgcacactgccgtcctcctgcgtggacatcaggatcagatcctgactgctgccgccggtgatattttccaccagatactgctcgtactgctgctccagaatggtggacagggtgccgtcctgataggagtacaccgccagatagtggtcattctgggcagcggtatagcccaccaccagctggcagctgtctgtatcctgcaattgggcaagactgacgttctccaccgtttcggcaaggccctccacgctctggcgcacctgccagcttccggcatcatcccgctgcaaaatggctacgcagacgttggcggtctgggcggtggtatacagcaccgccgcatcctgctgaccgtcaccgtccaagtcctgcagcacaaagggggaaagcagctcgccctgaataggatatttcagctgggcactctcccccagccagtcgttcagggcagtttgcagtgcgccgtaatcgccggaaagcttcggggcacgcagcagttcctctacctgtgccttttcgttggccggcagcacggtctggcagctgcacagcacaaagcacagcagcgtgcacaacaccagccgcagcctgtgggtcctgttcataccggtcaacctccttccgggcataaaatgctattttcagtataccacactttgcggacacaaaaaagggggtgggacatatccggcaagcttgcgcgtgggacgattttgaatgcgcgccgcgactgagggggtaaaccacaaaaaaagaaaccactgcacaaaagctgtgcaatggtttctcttgttactgtatcaaacagtcagagcaggatcagacgagctccagaactgccatctcagctgcatcgccgcggcgagcgccgatcttgatgatgcgggtgtagccgccgttgcggtcagcgtacttggggctgatctcgtcaaacagcttctttgcaacatcttccttggtgatgtaggcgtagacctgacgcttggtgtgcaggtcgctggccttgccaaggctgatcatcttctcggccatggaacgaacgtccttagcgcgagtgacagtggtctcaatcttgccattctctaacaggtaggtaaccatagcgcgcatcatagcgttgcggctgtcgctggttctaccgagctttctggtaccgggcatcccgtttcactccttaaattattttagttattcgtcatccgtgttcagcttgaagccgagggagtccagcttagccatgacttcctccaagctcttgcgaccgaggttacggaccttcatcatctcgtcctcgctcttgctgaccagatcttccaccgtgttgatccctgcgcgcttcaggcagttgaaggaacgcacgctcagatccagctcttcgatggtcatctccagagccttctccttgtcgtcgttggtcttctctaccatgatctcagcgccggcggcctcgtcagacaggttgacgaacaggttcaggtgctcggtcagcacacgggcagccagagaaacggcctcctgtgcgttgatcgtgccatccgtccaaacctcaatggtcagcttgtcgtaatcaatggcctgtccaacacgggtgctctcgacgttataattcaccttgagcacaggggtgtaaatgctgtcaacgggaagggtgttgatatcgttcttctcgatgatagcctgtttgttgcgctctgcgggcacatagccgcgacccttgtcgaaagtcagctccataacgagcttggcaccctcgcccagagttgcaatgtgccactcagggttcagaatttcgatgtcgtcgccctgcttgatgttgtcagcagtgacctcacagggaccaactgcctcaacacgcactgtcttcggaccatcggtgtacagctttgcagcgatacccttcaggttcaggacaatttcggtgacgtcttccttgacgccctcaatggtggagaactcgtggaccacaccgtcaatcttgacgctggtcacggcgacaccgggcagagaggaaagaagcacacgacgcaggctattgcccagtgtgatgccaaagccacgctccagaggttctgccacgaatttgccgtagcggccgtccggggacaggcttgccgtttcgatcttgggacgttcaatctccatcatatctatgccctccttgtcaaaccggtgtttccaccggcccattattgaattctttcaaaaaagaatgcgaaagcgtgccatccaaaaggaaggcactgccttcttaatggattacttggagtacagctcgacgatgaggtgctctgcgacttcgtagtcgatatcgctgcgctcgggcagcttagcgacaacgcccttcagagaaccggtctcgcggttcagccatgcgggcagagccacgacgggagcctcagcaccggtcagctttgcaaactttgcagagctgcggctggactcgcgcacttcgatcacatcgccggccttcacctggtaagaggggatgttgaccttcttgccgttgacggtgaagtgagcgtgagacaccagctgacgagcatcgcggcgggtctgagcaaagcccagacggaacacgacgttgtccagacggcactccatgatctggagcaggttctcaccggtcttgccggggcgagactctgccttcaggtaagcgttgtggaactgcttctccagaacgccgtagatgaacttgaccttctgcttctccttcagctgagatgcgtactcagactgcttcttgcggacgttgccgttggagttgcgggtggtattcttctttgcatagcccatgaccgcaggagaaatgcccagggccttgcaacgctttgcgataggc

SEQ ID NO: 13817 - DNA, 4697 bp, Unknown
  gut microbiota DNA sequence
aaagtaactattcaaaactctatgggtcataggggacttttgaacagtagcagctgtgcctcagatcagcgcctccatccgcagcgggtcggggtgatgggcgtatttctgcttggcgatctcgataaaggactgtacctccagccggggtgcgtggcgcatggcggcgatctccaccgtcaccgggggaaaatccagcagcggcaccttgacgatgcccgggatcaccgccgtggaaaggcagggcacgatagacatggcggtgcccatctggatcatgatcagcgcaccctcaaagctgggggtgatcttgctgcaatccacccccacctgcgccagctgctccagcgacggcccctgacaggcggacagaaagctgtcgaatgcgccggaggacaccacgctctgccccttcaggtctgccagatgcagcgcccgccggtcggcaaggggagagttggggttcatcagcacatggtagcccagggcgaacaggggcgtaaaggagatgtcccggtcgcgggagtgctcggtggcgtagaaaaagccgatatccagctgcccggagcgcagctgttccagtgggcggcggttgtcctgcggcacaacgtctacgcaggcgttgggaaactggtgctggaactgggccagaatgctggaaaaggtgctgtaatcgaacagctgccgcagcccgacggtcaggtgggagcggtcggcgtcctgaatatcctgcgccttcttcagcgcctgccgcccaaagctggtcatctgcaccatgtccagataaaaggactgcccggcagcggtcagcttggtgcggcgggtggtgcgctcgaacaggtgcagcccggtctccttttccagcgcattgatctggtaggtgatggcgggctgggtggtgaacagccgctcggcggcggcgctgaaattcagctcctctgctacggcaataaagcactctaactggtaaatcgtcatagaatggcgcacctccttgtgtaaaaagctggtcatctttattatacaggattccgcacaggccgtaaagggaaaacgatttataaagagatttgataaattatggtacaaatttgtatttcacaccgggacaaaactttgctataatcgtatcaatgttcaaaatgcacgaaggaacaggaaaaacgcaaaaaagaagagaaaagaaaaagaaaggcgaaccttatggctaagatctctcgtcgcaactttatgcgcggtgccgctgtgggcaccatgggcgcagctgctgccggtctgctgaccgcctgcggcaactccgcttccagcaccaccggtgctcccgcttcctccgcagcttcctctgctgcttcctccgctgtgaccaagccctcctccccggtggacggcaagtacgtcaccaaggcaatgggtcacgaaagctgggtgcacgttgccaccaccttctttgatggcaagatcactgcctgtgaggtgttgtctcacgaggagaccatcggcatcggcaactatgcctgctcccgcatccccgccgccatcgtcgagcaccagagcgtcaacgtgcccaacctgcgcggctcctccatcacctccatggctgtcaaggcagctgtgaaggaggccatcgagctggccggttataacgtggacgacttctccaaggaggtcaccatcgctgcttccaacgaggtcatcgaggaagaggctgatgtcgtcatcatgggtgccggcacctccggtctgacctgcgcctgccgcctgctggaggccggctacagcgtcattctggtggagaagcgcgatatccccggcggctccatgtccatgacctacggcggcgttgccaccgcaggctccaagctgcagtacaactacgatgtggacggcagcttccgcagctctgccatgggcacgctggagggcatgatgaacttctggcagaccatggagaagtaccaccgcaccgagttcttcaacggtgaaatgccctacatgaccaagcagtacaccgtcgccggtgatctggtggactggatggcaggcatcggcatcggcttcaacaccatgggcaactacgaaagcgctacccagtacggcgcttccaccccgtatctggcacccggctgctacgagggcggcgcaggctacgccatgatgttcatggcacagcgcgtggagaagtacgagaagggcaagatcatctactccaccagcgtcaccgacctgatcaaggacgagagcggccgtgttgtgggcttccacgccaagggcgaaaacggcgcaagctataccctgcgcggcaaggcggtctgccttgcctccggcggctttgccaagaaccccgaaatgctgaagaagtacagccccgactacgccgacttcttcttcaactgcgcctccagcatgaccggcgagggcatccagatgggtattgacgccggcggctatgtggagtgcgaaaaccgcgctctgcccgccttcctgtccagctacaagagcaagttcgagctggccttcatccaccagtctgcccccggcatcatggtcaacatcaagggcgacaacatcggcaacatcgtctccgataaccactacaccatggccaaggcaaagctgaataaagacaacggcgacaccttctactatgtgttcgacgagtcctctgccgtcaagctgcgcgacagcgagtcctacggcttcaacggttacgttgctatgttcgagaagggcgaggctgtgcactacgacagcgtggagaaggcctctgaggagctgaacctgcccaatctggcagacgccatcgaggccaacaacgccgccgctctggctggcgagcccgatgagttcggccgccgcaactgcccctacatcgagacccgcgacggtctgtgggccatccgcgttgaccccaccttctacctgaccaccgcaggtctggccatcgacaccgattgccacgtcctgaccgaggacaagaaggccatccccggcctgtacgctgccggcgacgtctgcggctccatcgaggagaaggacgccaagcagtacggcatgggcttcgacgccgctctgacctacggctacatcatgggcgagaccctgaagaaggagatctgagctgcgctctgaccccctgacaaaagcataaataaagggctgctgcacaaaccgtgcagcagccctttttatatcatatttccttttacgccgccgcgggcttgcggaagatggccattgcacgcttgtagcagctggcaaaataggcgatctccgccagtgcggtcaggatccagctgcacgggtacagcaggtacagcgccgggatggtgtggaagtgggcaaagatggtgtacacccagatcacccggaatacgcacgagcccagcaccacgatgacggtgggcaccaccgtcttgcccagcccgcgggaggcggcgatggtgcagtccataaaggccgagatgccgtaggcaaaggccatcacggctacacgcttcatgccggcatcaatgaccgccgcttcggtggtgaacagcgcaaggaaggccggcccgcagaagaacagcgccgcgcccagtacaagccccacgccgaatgagtagcccagactgatgaagtagctcttcttcacccggtcaggccgtcccgcgccgtagttctggctcataaagctggcgcaggccatgtagaaggccgccatgcagtcgtagatcagcccatccgcgttggcggcggcgctgttgcccttgaccatcagagagtcaaaggagttgacgcccgcctgaatgaacaggttggcaatggcaaaaatggcgttctgcagcccggcgggtacgcccagtgcaaggatgctcttggcttgcaccgggtccagctgtaatttatgtaggtccagcgcgtagcagtcctgcacccgggtcagcgcccgcaggatcagaaatgccgaaacgcactggctgatggcgctggccagcgccacgcccaccacgctcagatcgcacacgatgacaaagaacaggttcagcgcaatgttcagggcaccggcaatagaaaggtagagcagcggctttttggtgtcgccgatggagctgaacaccgcgttgccgaagttgtacagcgccagcgccggcatacccagaaaatacacccgcagatacaagatcgcgccgggcagcagatcctccttggtgttcagcagccgcagcatggcgggggagcccagcaggccgatgagcagcaacgccacaccggcaacagcgctgatgatggccgccgagtggacggtcttttccacgtccttggggtggcgcgcgccgtaaaaacgcgccaccagcacgttgatgccgttgctcagaccgatgagaaagccggtgaacagggtcaccagcgtgctggtggagcccacagcgcccagcgccgtagacccggcaaagcgccccaccaccgccacgtccgacatattgaacagcacctgcagcaggttggaaagcgccagcggcagactgaccagaaagatctgcttggccagagggccttccgtcagcgtattcgtttgagaactcatacttttttcctttatcctatacatcctaaccgtacccgcgcacaccggggcacagcctctattataaggcactgcgctgcttttgcaagatggattcgataaaataataaaaaggactgctgcacataacctg

SEQ ID NO: 13818 - DNA, 5609 bp, Unknown
  gut microbiota DNA sequence
atatttcgcggtttcggatgcgaaaagcgagctttccccatgggacagccgtttgcaagtatccagcaggggctatatgatggggtacaacgatttgaaagatccttctgtcagcggctttttccggtttctcgccaaggtcggggacaacgggatgaaaatgcagatcgtgaagatcggatttggagacagacaatgaaatatgccgggatgcccatggggatgtgggtgctgtttgccggctcttttcaaaagcagttgaccgcttacgatttgagctttgtagtggttgttttgcaaaacttttattctttacttgataactgtatacgataaaaccaaagggagctctgcccggatcttcgtccgtgacggaactccccttttttagctttatagaaaaaccataagtcatctgccatggtcaacggagcaagaaccacacgcccagcaggatcgcaagaaagatcaggttggacagggtgaacagcccaaaatactgcttcttcccctgtggcagttcccgtgcgatctgccggtaggaaataagactggccatggatgcgatcaaagtgccaagacctcccagattggtgccgatgatgagggcttgtgtctctgccgtgaacccggacagcagcagggcggcgggaacattactggtgacctgcgaagcaagaaccgccaccagaacttcccggccggtcagaaactcctgcagccagccggaaaaggccggaatgcgccccagattgccaatgaagatgaaaaaagccacaaaggtcaaaagcagggaatagtccactgcccgtaaggtgtgcgggtctgcaaaaagggcgcagacgagtacagcggcaaaggcaatgccatagggcaacacccggatcacggacagcaggcaaacggcaaacagaaccagatacagcaggataattttctgatccccctgagatgcagaagaaacaagctcgtccacggagagggcggcagaggatttccggcagaccagcgctgcccaagccagcagcaggagcagagagaccagggtgtagggcagcataagaagaacaaatccaccgatgctcatgccgctttttccgtaaagatagaggttctgcgggttgccgatgggggtcagcatactgccaaggtttgccgcaatggtctgcatacagaccaccgggatcagaagagcgcggcggacatccgctcccagacggctcagaaccacgaacgtaaagggaacgaaggtcagcagggaaacatcgttggtgatgaacatgcttccgaaaaagcacaacccgaccagtaccagtgtcagctgaaaggtgctgtgggtgcgggacagcaatgcccgtcccagtccatcaaaaaagccctgccgccgcagcccggccatgaccgtcatcagggaaaacaggatcgccagcgtgcgcaggtcgatgtagccgagatactgcgcatccggcggaacaaagaaggcggagacaacggccagcacagcggctgcggtgaggaccgtttcctgctgaatgaattgtttgagtagtttcatagagacacatccttgtagttgtaaaggctgccctgctgcggtgccggacggcctttttccgtatttcagagcaacagctcaaacgacccgatcatcagcggcatggtcaggatggaaagcagcgtgctcaggacatagatcgcgcgggaatgagaagcatcccggtcatagagctgtgccatggaggtgaccgttgcacaggcgggggtaatggcagaaaggtagaccgtcatcaggatggacttgccgtccgggatccaaagggatgcgtgaactgcccaaagcagcaagacaatgaccagcggaacacccagcagacgcagaaacaccggcagatagttgcgcggggtgcagaaaacctttttcaggggcacttccgcaatggccatgcctgccagcagcattcccatggggccgatcatattgccgacactgctcagtgtgctggtgatcggggcgggcagcgagacgtgcagcaggtacagcagcgcaccggctgcaatggcgatcagattgacattggtaaggagcttgcgccattccagctgggcagacccctgcaggcaggcacttgcatgggtccagagcagtaccagctgtacaatgacaaaggcgcaggagtagacaacatattcctcccccagcagggcctgcacaatggggatgaccagcgcggcggcattgctgtaaatgatattgacctgctccacggcgtccagcttgagagacttgcggaacagcgcattcagaagcagaaatacaacgtgcattccaacggcgatgcccatggaataaagcaacccggtgcggatctccggagtatccttgatctgaaaggcgttcagaacgacacagggcatgaccagatagacaaagaccacagacagcaccttgctgtccgatgccttcaacaagccggtttttacaacggcatatcccatcagcagaaccagaaatagctgcgcgatctgctgcatcaataaaaggctgatttgcatttggatctcctcttttgcaattcatttttgcagcacaatcctactccattagcggggcatcgtcaagagaaaacagaaaaaatacgattagagcaagaaaaacggatggctccgcagaaccatccgctaaaactggcatcatcagtctttccggtacttatatgcaccctcaatggcgtcaatttccgtgggaatgcagaagtttacgccctgatacatggaagagtagccttttaagcaaggatcccggtggactgcaaaaacagcaccagcatcatcactggggcaacatagcggatcatcatccggtagagtttcttgcggcggaaggtcttgccgccccgctgcatctcgtcaatgacgtaatccggcgtcatgacccagccaatcaggatggtggacagcagagcaatgaaaggcatcataacgctgttgctgacatagtccatgatatccagcagctgagccgcagagccgttgggcagctgtacctcaaaatagaagatgctgtaacccagcgcaatgatggcggacgcggccagataaatgaccgtcagcacaagcaccgtctttttgcggcccgagtggaagatctccatgcagttggcggtgatggattccagcaccgagatgcaggaagtgagagtggcaaaaatggcggtaacgaagaacaggatgcccacgaaagtgccggccttgcccatagcggcaaacaccttgggcagcgagacgaacatcaggctggggcctgcactcatgccctcggtaccggagaacacatacacggcaggaatgatcatggcaccggccagcagagccacgcctgtatcgaagatctcaatctgattcaccgctttgttcaggttgacctccggtttgacgtaggaaccgtaggtgatcataatgcccatggacacgctgagggagaagaacagctggctcatggcgtccagcaagatctgcaaaaagcggctgacggtcagcccttccatgtgcggggtcaggtagtagcgcagcccttccataccggtgcgcatctggccggaagcgtcctcgtggcgcagggtgagggcgtaaccagcgatcaccaccaccagcaccagcagaatgggcatcatgtagcgggacacccgctcaatgccgccctccacgccgttgtacacgatgaaagccgtcacgcccatgaacagcagagcgaacaccacaggcgacaccggcgaggtgatgaagctggtaaaatagccgtcctccgcagcggcggcagactgtccggtgaggtagaccaccgcatatttcgtgatccacccaccgatgaccgcgtagtaggtcatgatcagaaccggtaccagaaaggtgaggatgccgagaaatttccacttggggcgcatggtctcgtaggcgcggatggcactctgcttggtgcggcgtccgatagcgatatccgaggtgagcagggtaaaaccgaaggtcagcaccagcaccagatacaccagcaaaaacaaaccgccgccatcctttgcggcaaggtacgggaaccgccacaggttgccgacacccaccgcacttccggcggcagcaaggacaaaaccgatttgtccggagaaactgcttgctttcttttccatgattctcaaactcctatcctaaaaacctattgtaatataggataacatgaagtatcatatcagtaaacccaataaaattactacgacctataaattttacttatggagcgtttgcaatgcgggaacagaaagaccgatacgagatattcttgaaagtatgcgaaacgggcagtttttccaaagcagcggaggcactgaactatacccaatccggcatcagccagatgatggcagggctggaagaggaattgggcgtgcagctgttcgcccgcatcaaccggggcgtgaccctgacagataacggcacccgccttttgccctacatccgggagctggccaaccagaagacccagctgcggcaggcggcgttcaatatcaaccacaaggtggagggcaagctgcgggtgggcagcatttccagcatcacaacgctctggatgccggaagtcgtgcattatttcaaggaaaactacccgaaggtgaagattgaaattctggacggcaactatgatgagatccgggaatggatcatccgtgggcaagtggactgcggtttcctctcatccattgtggcagacgacctgaaattctacccgctccgggacgacccgctgtgcgctgtgttcccggaggggcatccgctggctgcacattccagtgtgaccctgccgcagctgtttcagtatccgctcatcatcgaaacgcccggctgtgataacgacatccagcacctgatgctcaaatgcccggtgaagccgaatattttttacagcttccgggacgataccctcatcatggcgttcgtgcgcagcggactgggcgtgaccatctcacaggagctggtgatgcaggcatttggctgccccggtgtggtgtcccgcccgctggagcctgcctgctgccggacattggggctggcgttttccaagacggcaagctcggtggtgagccagacgctgctggaatatctgagctccacccggcagcgaaaggaaacaccgaagataaaataagaacaaatagaggagaacggtataatgctaggtatccgtaaaacagttttcgagaaatgacacggtaactgcctgtcaggattggttacgagtacccagctaggccgaggaagcaccaagtcccatgtctgtaccgtcaaggtgttgggcatggggctttttgcatttcaggaacgtgtacgcctctggcaaggtgtaacacactagactttgtaccaaagtcgtgagccaaaggtgctgcgccccttagaatccctgctcacatcgcctgtgggcgatgtggattcgccgcatagaagaaagctctcacaaaggcgcaccccggctgtttgcggcgaggaaaaggcacttctgcggaagtgtaataacccactatgacactttcatccttgcggcctgcaaagtgtagtgggctctc

SEQ ID NO: 13819 - DNA, 9372 bp, Unknown
  gut microbiota DNA sequence
taaaaaatctttattccgctgagaatatccagagcgaagcggaggacatttctaatcgtcttacgcgaaagggctgctgcacaaaacgtgcagcagccctttgtttgtatttactgttttgccagctgtttgtccagccatgcggcgatgtccccgaaaacctccagcttgttggtctccaccagcagctcgtggcgggcaccggggtagaagatgctttcaatgttctgcacaccggcgtccttcaggctctggatggcgcggcgcacgcccttgccctgctcgcccaccgggtcggcatcgccggagaggaagagcagcggcagctccttgggcatccgtgccagaaaagccgggtcgtgcaggcgcaggatgccgctgaacatactataataggcgttcagcgtaaaggtaaaggtgcagcgctcctccgccagatacttgtccacctcggcctggtcgcggttgagccagtcgtgggtggtgcggccctccagccccttgttgtagcccataaaggaaaggttggccacaaggttgctgcggtagtgccagccgtggaaggcggccagcacccggcaaagggtcttggcaaccttgaccagcgccttgggctggaaacctgtgcccataatgatggcaccgttcagctcccggccatactcgcacaaatactgccgggcgtagaacgagcccatgctgtgccccagcaaaaagtagggcaggtttgggtacagctccttggtcagcacggtcacggcgtgcaggtcggccagtacggcgcggttgccgtccggctcggcaaaatagccgtagtcctccttggtgcggatggatgcaccgtgccccagatggtcgtggccggtgaccagaataccccggtcggccagatattctgccaaggggcggtagcggtcgatatactctaccatgccgtgagacagctgcagcaccgcccgcacctgcccctccgggacgcagcgaaagccgtgcagggtgcgccccggcacggtggagggaagggtaaagtcgatgaactgactcatgaaaggggccccctttctgcgttacagtgcgctgagcttgcggcggcaggcgctgcagatgcagtagccgccgaactggatggcttgctcgtccacctcgccgcagaaatcgcagctgccggcggggcggtgctttttcaggacgatggcgtccccatccacaaagatctccaatttggtgtcggtgtcgaggtgcatactagtgcgcagctccttcggcagaacgatccgtcccagcgagtcaatgccgcgaacgatgccagtgcttttcataatgtgtcattctccttcactattccttattcctttttagcaaccactgacacaataggaaaattgtgccagcgccgataagcttagtatacaaaaaataacacctttcgtcaatgattgcgtgcggattcgacaaaaaaagaccttttgcacataaaggtgggggagattctctccgtgaaaaaaggggttctgaaaagcctgcaggcttttcagaacccctaaattacaaataattctttctcgccgtctcagctcagctccacaggggcttcgggctggttctccacgcgggcgctggtgcgtccctcgggacggatctctccggcggcgaccagcgagatcttggtcagagtggggcctaccagctcgtacaccagcaccgagaacagcaccacgttgcgcaccatgtggccgtccgacagctcggcggcggtggccgccatgcccagcgctacaccggcctgcggcagcagggtgatgcccagatacttctggatggcggggctgcagctggtggcgcggcagctcaggtaagaaccgctgatcttaccggcagagcgcgccacaatgtacaccacgccgatgagcagcaccatggggttggtgaggatggtcaggtccagctctgcgccggacaatacgaagaacaggatgttgatgggggacacccagcggtccagacgatccatcagctcatccgaggtggggcagacgttgcagaacacggtgccggtcatcatgcacaccagcagcagagagaagccgcagcgggtgccattgatctcgaacttggtcatggacagacccacggtcagcagcacaaaggccaccgaaaggctcatgcgcttggagcgggagtggaagtagacctccagcaggttcagcaggtaaccggcggcagcgcccagcgccagcgagagcgcgatctccagcagcggctccagcaccacgctcatggggtcgatgcggccctgttccagcgcgtttgccacgccgtaggaggccgagaacagcaccagacccacggcatcgtcaatggcgaccaccatcagcagaagcttggtcaaagggccgtcggccttgtactgcttgaccaccatcagggtagcggcaggggctgtagcggcggcgatagagcccagcgtgatggcagaggccagcgagatgacgtccgggcgggcaaagtgcagggcaacaagggcgatatccaccagcgcggtggtgatcaccgcctgcgcaacgcccacggtcacggcgcggcgtcccatgtgcttcagggcgctgagccggaactcgttgccgatgacgaaggcgataaagcccagcgccacctgtgtgaggatgccgtagccctccacggcagcaaggctgccaaagccaaagccgaaacggctcagccccagccgacccagaaagaaggggcccagcagcaggccggtaagcaggtaagcggtgacggcgggcagacgcacggccttggcagcgcgtgacatgagcaggccggcgatcagggcaagggacagacagatcaacatttgttccataatgtggtttgtattgggtgcgcagccaaaggccgcagcactcggttcctccttgtcaaaaaagtatcgaactcccgtgtgaaatccagcgcggggtccaaatgggaaaacgtatccagtataccggaacaacggaggaaaagcaaccatcctgcgcgtttcatacatcttttgagacgaaaagacagaaacaggacgagaaaggacggaatacaagcagttcggctgccgttttcctttacgaccccagccgtgaaaaagggatagcggagcgcccgcaggcgttccgctatcccgaaatataaaatatgctcttagttgaacttgaagatcttgcgcagctggcggtaggtggctacgaccaccttgtcgccgccggggaagtgcaggtcggtcaggccgccaaggttcacgcgcacggcgcggtagacaccgggggtaacgtgatccttgaggtactgccacagctcggcctttttggcgtgtgcctcggcgctgccgtccagcagcagaaagatgtcgctgaccgccatcatgacggacaggtagtgcaccatgtaggcgcgcagacgcttctggcccttcagcgcgtccagatcctgacagtcgatcatgtgcttggtgacccgcagctgctggtccacacggccgaccatcacgctctcgttcacgctctggtctgctcgaccgatgaagtagcggtacagatccagatccatatagtacatgctcttgacatagggcaggggctggtacacaaagatgttgtccacatagaaggtgtgcttgggcagcaccatgccgcactcacgcagcacctcggtgcggtacatgaccgagtgcatcagcaggttctgatccgggcggaagtgccggacgtgtacccagtcgaacaggcggttctgcgggaacacgttggtgtagcgcacggtatggctggtgccgtcctccacgtgctcgtacacatagttgcagatcatcagatccggcgcggtgccgcgggcaaccagtgtggtcaggcgctccagcacctttttcagggcgtcggtgtccagccagtcgtcactgtccactaccttgtagtacaggccggtggcgttgcggatgccctgattgacgccttcgccgtggccgccgttctcctgatggatggccttgacgatggtggggtactttgcggcgtactcgtcgcagatggcgggggtgtcatccttgacggaaccgtcgtccaccagaatgatctcggcctgctcgcctgcgctcagcagcgtttcgatgcagtgacgcatataggctgcggaattgtagcagggcacggcaaaggtgataagtttctgctgcatattataaatgctcctttttacgttgcatggtccatgccgggcagtctgcggggtggcatggagatatgtgttctcattatagcattttcgcgcctgaaaagctatccttcccgggcagaaagagcgcttatcgcacacttttgcgcaaagtgacgcttttttctgccaaaagtatcagttttgtggtatactgataaggttttgagcgttctgcgcgtcagtgcacctatatatataacggaggaaaccatggaaaacccgcacagtatcctgaaaaaagttttcggctacgacagcttccgccccgggcaggagcagatcgtcagccgcctgctggcagggcaggatgtgctggcggtcatgcccaccggcgcgggcaaatccatctgctatcaggtaccggcgctgcttttgccgggcatcaccatcgtggtgtccccgctggtcagcctgatgaaggatcaggtgggggcgctggtgcaggcgggcgtggcggcggcctttctgaacaacagcctgaccgacaaccagaaggcgctgatgctgcaccgcgcccgggagggctggtataagatcatctatgtagcaccggagcggctggagatgccgggcttccagcggtttgcgcaggagcggcagatcagcatggtcacggtggacgaggcgcactgcatcagccagtggggacaggatttccgccccagctatctgcgcatcaaggcgtttgtggacagcctgcccagccgcccggtcatgggcgcgttcactgccaccgccaccgcccatgtgcgggaggatatccgcacccatctggcgctgcaagcgccctacgaggtgaccaccagcttcgaccgccccaacctgtacttcgagacccggcgggcactgcccagccagaagcccaaggagctgctggaactggtgctcaaagagggcaatcatgcgggcatcgtgtattgcagcaccacccggcaggtggacgagacggtgcagctgctgcagagccgcagcatccgggcggcggcttaccacgcaaagctggatgcggacacccggcggcagaatcaggacgacttcctctacgaccgggtacaggtgatggtagccaccaacgcctttggcatgggcatcgacaagcccaatgtgcggttcgtcatccattataatatgcccaaggatctggaaagctattatcaggaggccggacgcgccgggcgcgacggtcagcccgcccggtgcaccctgctgtattccggcaccgatgtgcgcaccatccgctttttcatcgataaggagcgggaagccgacaacggtctgcccgcagatgtaaaggccgaagccgcccgcaaggcagaagagcggctcaagtacatgaccttctactccaccacccagcactgtctgcgcggttttctgctgcaatacttcggggaggccgcgcccaaaaagtgcggcaactgctcctgctgccttgccgccgagcaggaagcccagttgcaggtggagtacgcccgccgccgtgccgcccaaagcgccgaccggctggaaaagccccgccgcgcaaagcccgccgcagcgggcagcctgagcgaggcggacgaaaagctgctcaacgccctgtatgcggtgcgcaagcgccttgcgggcaagcagaacctgcccgcctttatggtgtttaacgatgccaccctgcgggagatggcagagaaaaagcctatgagcatcgacgagctgctgaacatcagcggcgtgggcgaaaagaaggccgcccgctacggcaacgcttttctgcgcgtcatcgaggacgccgtgggcagccgggagtgagaaaagaaagaagccgctgcacagtctgtgcagcggcttcttttagtgcgggacgatttcgaatggcctccgcgttgctttggccatattcagcggaagaattatttttaatagagcgtttgtcgcggcctgcgggccgcgacaaacgcattttcacgagaaggagttcagcaccgcttaccgttccatggtatgggtggcgaataccttttcgtcctcccaccacacgggctgcccggcggcaagggacttgggtacgtccagcaggcgctggttgcggctgccgcggaagcgcagggagatgtcgtgctcggcctgcacgaatctgccgtccaccagcacatccagcagtgccagcagctcgtcggtcacctcacaccgcgcggggctgggctctgcgccggtaagctgctcccacgtgtagccggagtagcaccacaccgtcttggcggggtacagagccttgaagttgcgcacaaagggcagcagctcccgctggttctctggttcaaagggttcgccgcccagcagggagagcccggcgatatagtccggctgacaggaggcgaatacctcgttgcgcacggttttatcaaagggctgaccgtagtcaaaatcccatgccacggcgttgaagcagcccgggcagtggtggcggcagccggacacaaaaacgctggtgcgcaccccggggccgttggcgatatcgtaatatttgatgtttgcgtagttcatgctcatgttcctgtcgtttgctgaaaagatatttggagcggccgaaaggccgctccaaatatcaaatcaaaaataaaatttagctgttgttacagatgcagcacgcgatccttgatctcctgcgtgcggccctggttccagaactgggtgccgatataaccgcaggtgcggcgggcgacgttcagcttgttctggtcgcggttgccgcacttggggcactcccacaccagcttgccgtcgtcctccacaatcttgatctcgccatcgtagccgcacacctgacagtagtcggacttggtgttcaactcggcgtacatgatgttgtcgtagatgaactgcagcacgcttatgacggcttccagattgtcctgcatgttgggcacttccacatagctgatggcaccgcccggggacaggcgctggaagtcggcctcgaatttcagcttggtaaaggcgtcgatgggctcggagacatggacgtggtagctgttggtgatatagttcttgtccgtgatgcctttcacgatgccaaagcgcttttgcaggcacttggcaaacttgtaggtggtggattccagcggggtgccgtagagggagtagtccatgttctcggccttcttccacgcgttgcacttgtcgttcatgtgctgcatcacgctcagggcaaagggcttggcaccggcatcggtgtggctcttgccggtcatatacttcacacactcgtacaggccggcatagcccagactgatggtggagtagccgccgaacagcagcttgtcgatcttttcgccctttttcaggcgtgccagcgcgccgtactgccacaggatgggggcagcatcgctgggggtgcccagcagccgcttatggcgcgcctgcaaagcccggtggcacagatccagacgctcgtcaaagatcttccagaacttttcaaagttgccgccggagctcagtgcaacgtccaccagattgatggtgaccacgccctgattgaagcggccgtagtacttgggcttgccggtctcggggtccacatagggagtcaggaagctgcggcagcccatgcaggtgtagcagtggccctcgccgttcttgtccaccttgagttccagcatcttcttttccgagatatagtccggcaccatgcgcttggcggtgcacttggcggccagctcggtcaggtagtagtagggagtgccggggcggatgttgtcctcttccagcacatagatcagcttggggaaggcgggggtgatccacacaccggcctcattcttcacgccctgatagcgctggcggatggtctcctcgatgatgatggcaaggtcggccttttcctgcgggttgcgggcttcgcccagatacatgaacacggtaataaagggtgcctgaccgttggtggtcatcagggtgactacctgatactggatggtctgcacgccgcggttgatctcgttgcgcagacgacgctccacgatctccttcttgcgctcggcagagacgtccagaccttccatctccagctctacctcggcggcgatcttcttgcgggagacgtccacaaagggagccagatgggtcaggctgatgctctggccgccgtactggttggaggccacctgtgcaatgatctgggtggcaatgttgcaggcagtagagaagctgtgcggcttctcaatataggtgccggagatgacagtgccgttctgcagcatatcctccaggttcaccagatcgcagttgtgcatgtgctgggcgaagtagtcggaatcgtggaagtggatcagaccctcctgatgtgcctttacgatctccgggtccagcagcagacgggcggtcagatccttggagatctcgccggccatatagtcgcgctgtacactgttgacggtggggttcttgttggcgttttcctgcttgacctcttcgttctggcactcgatcaggctcaggatgcgctcgtcggtggtgttggtctggcgcttcaggctctggacgtagcggtaggtgatatagtgccgtgccacatcgtgcgcctgaatgtccatcagctggttctccaccagatcctgcacctcttccacgctgactgcgcggttaagctgctggcactggtcggtaacggctgcggcgatctgggtgatctgctcccggctcaggcgagcctgaccgcccacggaatcgctggctttggtaacggcggtgatgatcttggtaatatcaaaaggaacttctgcaccgtttcgtttgatgatcttcatcggttctcctccttctatataggcgcattgtgaacgggtacctcttaccataagagatacccgtctgcgcacaacgatatccaacaaactgaatgtagctctattttatcattatctagtggcaagtcaagcaaaataccactatattttgcgttttgtagcaatcgccaaaaatcgtggatatttttcgggacaaaattttgcacggaaactcttgacagagcgacttgctttccggcgagtaatatcagccgccgtctatacccggttgggatttgctctgcctatataatgtaataatataaggcagcgccggatgaggtgcagcacccattagcct

SEQ ID NO: 13820 - DNA, 22828 bp, Unknown
  gut microbiota DNA sequence
aaaaaggaaaatcccccgcagttttcacgaaactacgagggattttcttggcggagtaggagggatttgaaccctcgcgccgttgtttagacgacctacgcccttagcaggggcgcctcttcggcctcttgagtactactccagagcaaagtgcattacacttattcaataaaaaatggcggagagagtgggattcgaacccacggtacgttgccgtacggcagttttcaagactgcttccttaaaccactcggacatctctccttgtggacactcgcgttacgccgtgtcgaatgcctatttactttaccagatttacgctgttctgtcaagcccttatgcaaattttttcttttttctgtccgatagctgcacagcagccccatttaccacaacctttattcgaagtttttttggattttctctttacagaaacacctttttgttgtataataaaaccaacataaaccacccattgggaaaaggagcatcatcatgtcgttttcagagctattgaagcagtgccgcaaaaagcagggcgtcagccaagcggagcttgcctccagactgggggtcacccagcaggctgtcggcaagtgggaaagcggcaagtcctcccccgacccctccaccgtggcccgcattgcggaactgttgaacaccacggcggactatctgctggggctgtaccgcccggtcagcaacgtttctgcccccgaggagcgctttttcggcagctacaccgagagcctgatcccggtcatcggcacggtgaaggccggttacggcgcactggcctttgaagaggactacgggcaggagtacgcccgcgtgaaggacccctccaactatttttatctggtggtgcgcggcgacagcatggagccccgcattcaggatggcgaccttgcgctggtgcacaagcaggacacgctggaaaacggcgatctgggcgtactgatctacggcgacgagggcgagggcaccctgaagcgctacatccagcgcggcaactgcgtggtgctgcagcccttcaaccccgcctatcatgaaatggtcatcaggggcgaggacctgaaccacctgcacattgcaggccgcgtggtggagaccaaagccaagtggtaagccgggcgatttaaaatttcgctgctgaaggcttcccccagacggtggaaggcttttgttccggtaagcgtttgctttttgtcaaagacgtcccctctgtttttcataaagccatctgctattttgcgcatggctttattttttgaccctttttccctgttttatcccctttggaggtgcattttgcatggaacagaccctgatggacaagcttaccattctggcggacagcgccaaatatgacgttgcctgcacttccagcggggcgtcccgcaccgcgcgcccgggcacggtgggcagctgctacgcgccgggctgctgccacgcctttaccgccgatggccgctgcgtcagcctgctcaaggtgctgatgaccaactgctgctcctttgactgcggctattgcgtcaaccgccgctccaacgatatcccccgcgccacctttgcaccccgggagctggcagagctgaccatggaattctaccgccgcaactatatcgaggggctgtttttgtccagtgcggtgctgggcaccccggactacaccaccgagcggatgctggcggtgctgcggctgctgcggggtgaataccgctttgggggctatatccacgccaaggctattccgggcacaagcccggagcttgtgcagcagctggggtatctggccgaccgtctgagcgtgaacgtggagctgcccagcgagcgcagcctgaacctgctggccccggacaaggggcggcattccatcttccgccccatgaagcagatcgcggtatccggcgccgccagccgggaagagcttaccctttaccgccacgcgcccaagttcgcccccgccgggcagagcacccagatgatcgtaggcgcttcgccggagacagactaccacatcttaaagctgaccgaggggatgtaccagaagtacgggctgaagcgggtgttctactctgcttacatcccggtagccgaggacacccgcttgcccgcgctggacaccaagccgcctcttctgcgggagcaccggctgtatcaagcagactggctgctgcggttctaccagttcgaggcggacgaaattttagataaggataaccccaacttcaacccctatctggaccccaaatgcaactgggcggtgcagcactatgggctgttcccggtggacgtgaaccgcgcccccttcgagatgctgctgcgggtgccgggcatcggccccaaaagcgcccggcgcatctggcgcgcccgcaagcaggcggcgctggggctggacgagctgaaacgcatgggcgtggtgctcaagcgggcgcagtacttcatcacctgccggggcttttccggggcgcacccggggcgcggcagtgccgggcgggagcgcattacccgggcactcatcgaccccaacgtattcagcggcagctgcgagcagctgagcctgttcagcccgcccgccgtggacaacctcatcgggcagggcgtgccgccccggacggctgtccgcatggtaagggaggaggcagtgcaatgtcttgccaaggcactgtaaaccccaagggggcgcgcaagctgcacgatgccaacgtggtctacctgtacgacggcagctttgagggttttctgtgctgcgtatacgaaagctttgcccagcacgagcttccctttgcggtgtggacgccccagcgggagaccgccaccctttacccggtcaaggacattgccaccgaccccgccgttgcccggcgggtgtttgccagctttggcaaaaagctgggcgcagagaccgagtacctcgtcagccgggattttctttctgggcaggaggacaaggagctgctgttgctccggtttctgcatctggcctttgcgctgggcccgggcacggtcaagcgggagggacacccggtggtcgcgcccctctacgccatgaaaaaaagtctggactgggaagtagacaagtttcagggctttgtgcgtttcgaggaacacgacgggatgctgggcgcggtcatccaccccaaaaattatatcctccccctgctgcgcccgcacttctgcggacgcttcccggaggaggatttcatgatctatgatgccgtccatcaggcggtgctgctgcacgaggaacacagcacccggctgctggagttggcagcgcccttggagctgccgccgcccagtgcgcgggagcagcagtttcaggcgctgtggacgcagttctacaaaacgctggaaatcaaagcgcgccacaacgaaaaaggccgcatgacccattgccccaaacgcttctgggcggatatggtggagatgcaaggagaattgtaatcatttttcctgtgcttccagtgcgctttccacgcccttgagcagatcctctgccgggatgccgtacagccttgccagcgccatcaggttggaggtgttcggctccgaggtgccgttctcccacttggacactgcctgacggcttacgccgatagtctcagccacaaactcctgcgtcatcttgcagcgggtgcggttctccttgagcatttcagaaagcgacttgcgcacgatcttgacttcctccgtaagtttgggcggcttttccagattgcgggcaatgcgccaaagcagatagagtgcagccacgatggccaccggcagcagcagctgcacgagcatcgtcgcgatgctcaccgtctggagcgctctgaaaaataggttggtcagaaaatcacttttcatattcgtttcctcctttggaagctttttcttgtggtttttttgtggcacgattctaacacaaaagcccggttgcgtccaccaaccagagcgcaaactccggttgcggcgcgtatttttagcctattggggcagataattcacaaaaacgttgcatctgcatcgttgcaacgggcaaaacctatggtatactataagggatatccgggcaggcatttctgccccccaacacccccgctgcggggtcaacacaaaaggagtattgtagcgttatggttcgcattactatggaagacggcggcatcatcgacatcgagctgaacgaggaagttgcccccatcacctgtgagaatttcaaaaagctggtcaaggagggcttttacaacggcctgaccttccaccgtgtcatccccggctttatgatccagggcggctgcccgctgggcaccggcaccggcggcccgggctggaacatcaagggcgagtttgccgctaacggcgtcaacaaccccctcaagcacacccgcggtgtgatcagcatggctcgcagcatgaaccccaacagcgcaggcagccagttcttcatcatgcatcaggatgcacctcatctggacggccagtacgccgccttcggcaaggtggttgccggcatggacgttgtggataagatcgcttctgtccgcaccgactggaacgacaagcccaccaccccggtcaagatggccactgtggagcttatcgagggctaattttaaatgcaaaatagcggaacaccctgcgggtgttccgctatttttttgcaaaaaactctctgtgaaaagggtgccccggagcgtccgcagacgttccggggcactgaaataaaaaatcaaattccttggagcatggccaaagcgcacgcggcggccatttcaaatcgttttcagcagccttccttttcagccagcttgcggcccatgagcacgcccatgaccgaagccatcatcagtccgcgcgtccagccggaggagtcgcccagacagtgcagaccctgaatgttggtgtcaagattctcgtccatcttcaccttgttggagtagaacttcagctccgggctgtacagcagggtctcgttggcggcaaagccgggcaccaccatgtccagcatcttgatgaactcgatgatattggtcatggcacggtagggcatggcggcggtgatatcaccggccacggcatccttcaacgtgggcttcacgttggactgtgccagctccttctgccatgtgcgcttgccatccagaatatcgccgtagcgctgcaccatgatgtggcctgcgcccagcatattggtcagctcgcccaccttctgggcgtaggcgatgggctggttgaagggctcggtaaagttgtgggacaccagaatggcaaggttggtgttcgggctcttcttttccttgaagctgtggccgttgaccacggcaaggtcgttgtcgtagttttcctgcgccacaaagccgccggggttctggcagaaggtgcgcaccttgttcttccaaggcttcgggtagccgatgagtttggactcatacagcaccttgttcaccttttccatcacctcattgcggcactccacacgcacgccgatgtccacggtgccgggcttatgggcgatgtggtgctctgcgcagagcttttccagccagtctgcaccgcggcgtccggtgccgatgaccacctcgtccgcatacacgggcagcaggctgtcgccatccttcagcagcacgcccttacagccttcctcttccagaatgatgttttcgcactcggtattgaagcgcatctccacgccgttatctgccagatagttctggatggcaagatacagctcctgcgccttctcggtgcccagatggcggatggggcagtccaccagtttcagacccgcatggatggcgtttttgcggatctccttgatgtcctcaccggtgtagatgccctccacatgggggtctgcgccgaactccagataaattttatcggtgtagtcgatgagttcctgcgcaaactcctccccgatgagggtgggcaggtcgccgcctacctcgtaggacaggctcagcttgccgtccgagaacgcacccgcaccggaaaagccggtggtgatggcgcaggtggggcggcagttgacgcagtggcctacctctgccttggggcagtggcgtttttccaccggcttgcccttttccaccagcagcatcttctttttgctgccatggcgcagcagctccacagcggtaaagatgccggcagggcccgcacccacgatgatcagatcgtacttttccatgattttgttccttttcttgttatagatttactcatttatgatttggtggaatgtgcttgccctctccgtcacggcgtaaactttctcattgcgtctaatgctttagtgccaagctttacggcttggctctccctccgggagagctggcgagggagcgcctgagagggtttattccttactcctgcttctcctgctccacggtggcgctctcgtccacatggtccagttctacggcagtggcttctgcatcggtgcgggtcacgtccggggcgacaacgccgtcgccgttcagatcctcgccggtaatgctttccagtacggactgggtctccgggtgcagcttggcaaagcggcgcaccgccagcacggtgtacagagcgctgagcaggttgatggcgccctccacgatcaggataacgccgatggccatcaccagcgtttccatggcgccgaaggggtttgcgatcaggatgacgcccagcaccacgctgagcaccggcagcagcagaaagcccttccagctgtcgtagccgcagcggcgcaggtccaaagcgttctgcacccggccaatggcgtcaaagatgacgaacaggccgaacacgatgggcaaaatgcttaccacgatatcgctgcgcagcagcagaaaaacacccagtgcaaggcagataaggccggagatcagggtaagctggctctggaacaccccgcgctccaccacaaagtagcggatcagctgtaccgctgcgcaggccagcaccacgccgcccagcgcgtagcagacgatgttcagcgccgtgccgggcttcatgaccagaaaaatgcccagcccgacgtacagcaggctcatgaggatcagattccacttcagcttttttaccatagagatcacgttcctttcgtttgcagggccgctgcccgcacccgggtcagtggtacaggggtgcgatggtggtcttgttgatacgggcatagaaggccagactcatcaggatgctgacaaattccgcaatgaggaaggcccaccagacattgttgacactgccggtctgtgccagcagccacgctgccggcagcagcacgaacagctggcggcagaccgaaacgatgaggctgaagacgccgttgcccagcgcctgaaagaccgagctgagcacgatgctgacgcccgccagcaggaaatgcaggcagatgatgcgcatggccgggatgccgatggccagcatggcgtcgctggcggcaaagatgctcagcacctgccggggtgcgaactggaagatgcagaagcctgccagcatgatgccctcggcgtagcacaccgccagcttgatggtctttttcacacggttcggtctgcgggcaccgtagttgtagctgatgatgggcaccatgccgttgttcaggccgaaaatgggcataaacacaaagctttgcagcttgaagtagacgccgaacaccgccaccgccgtagcggagaaggccatcaggatcaggttcatgccaaaggtcatcaggctgcccacacactgcatggcgatgctgggcagacccacggtgtagatgcggccaatggccttggcgctgggacggaagcctttgaagctgatctggatatccgggtttttgcgggtgttgaagtacaacgtcatgcctgcaccgcagaactggccgatgaccgtagccaccgctgcgccggtggtgccggacagcgcctcgccgcagtagccgaagatgaagatggggtccagaatgatgttcaccacagcgcccaccagctggctgatcatgctcagataggtgcggccggtagccgccagcagcttttcgcccatggtctgggtgaacagacccagactgaagatgcagcacaccgacagataccggatgccctgctgcgcgatgacggagtcactggtctgggcgtagaagtagggcttcatgcaggtaaggccgatgacaaaaaacactgcaaagctgcacagggaaagaaagatgccgttttctgcggtggcgttggcgcggctctggttcttttcgccaaggctcttgctcagcagggcgttcacgcccacaccggtgcccacgcccacggcgatcatgacattctgcaatgaaaaggccagcgatacggcggtaagagcgctctcgctgacatgagacacgaacaccgagtccaccacgttgtacagcgcctgcaccagcatggagatcatcatcgggatgctgagtttcagcaaaagggggttgatctccatggtgcccatgatgttttcccgcacctcggcgggtgcggtctgcgattgatttgttttcacgatttctccttgccggaaatgtgggcagggcgcagaagcgccctgcccacgttctgtcgttgtttattgggtctggctgggggtcacagcgttttttcctttgcggcggctgcgtctaagatcatcttcacgcaggtctcgcggccaagggcggcgttgatggccagatcgtagttgtgggcatcgccccagcggttctgggtgtagtagttgtagtaggccgagcggttgcggtcggtcttttccacctcgtccttgatgcccttttcgtccttggcctttaccaaggggttggtcttggcgtactgcaagcgccactccttgggtgcatacacgaacacccgcagcacgtccttgcgctcccgcaggacgtagtcaccgcagcggccaaggatcacgcaggggccttcttcggccagctgcttgatgatacggctctgcagaatgaacacctgatcgcccagcggcagctcgttgcccatggtgtacaggctgtacagcaggctgtgggtgtgccgtttctcgctggcggcaacagcctcctccgacaagccggagttctttgctgccatggtgatcagctccttgtcgtaaagcttgatgcccagtgcatttgccacgtcctctgcgatgtagcgtccgccggtgcagtactcacggcccaaagtgatgatcgtctttgccataatgtgttcctcctgtttcatatatcgccctgaaaaagcttacggctgtgccggggcgtccccggtctggccattggctttgggttctgtgcttgcaggtacaggcttcggcttcggcagccgtacctctgctacccgcatggtgccggtctggtccactgcatacacgctgcatcgcccgcctgcggccagcagctccggcgggaactgcaccccgccgtcctcggtgcgggtacagcgcaaaaaggtgcggtgagcggtggtggcgtgcgccacgccgtcgtggggcgcgcaggcgatccagccggaaaaatcctccggcaggtctgcgggctcgccccgccgctcaaagtagtaaacgcccggctgggtgccggcgcgcagctcgcagcgcagccgccggggacggtcggcctcagtctcccgctgctttggccgcagggcaatggccttgccggtaaagtaacgcataaaatccaccagcgccatggtgcagttcactgcgccgtcggtatcggcggtggggtcgttcagcagcacaaaatctgccatcacggcgtcatcgtggccaaaaccgtgcagccccatccacagccgcaccgggtcgcgctgaccgcgcacccgtcgctccacctgcacggccaccgagcagccgtcgtggatctgctcccgcaggtcagcaagatccatccatgcctgccagcaggggtagccgcagcagcctgcggcggccgccgcaaaggcggtgttgccggtgctgcgggtgctgccgtcctccatggcgtaggccacttcttccggcaggatatcttcgccccagcggttcatcagcgccgccatgaccagcggcagatccatctcccgcccaaagctggggtcatgggcggaaaggcagtattccggcagatagagccgccggttcagcgcatggccgttgcgcttttcccacgcaagaggacgcaccgccgccgccagcagacgcaccgccggggtaactttatcgttgttagtggaaaggttcacctgcagctgcacgccggtgccgccgcccggggcggctaccgtgacggtatcgcccatcaaaaagatcatgccgtcctcgctctggctggacacgctgcaccgggggtagtccggtgcccacttgccaaagctcatccagcttgtccacgcccctgctgcgtacacccggcagcgcacctccaccatggtgtcccggggcgcatgggcgttccagctgacgttcaggttgcagaaggccggcatggcaaactccggggtggtgtagctgccgtacaaaaggctgcgtccggccacgctgtccagcaccagtgcgccgttttccagcgcaaggttgtccagctgcccgcgggaaaaggtctctgtcccctgcagcacaagattattccgttgttccatgggacatcgctcctttccgcagttttatcgcttattcttccggggtgtcgtcgtcggcgtagtcctctttcagggcggcctccagctcggcatccttcagcttgcggatgttctcctcgatgtggaacacccggtcgatatcgccgtacacgatctggcaggacacctcggtgacgaaccagaagccgaagatcagcatcaggaaaagacccagcggcatgcacaggatcaccacgccccagaacagcacctgcacgatggcggcagccagtgcgtggggcagaaaggcgatcatgcagttgatgctgtttttcaaggtcaggctcaaaggctggtccagcagcaccacctgcggccacatataggcaaacagcatctggaacagcaccagattgagcaccgtagccacccacagcggaacacccacgttggtgccgtggtacagcatattaaagcagaaatagacgaggaaaatttgcagcgtgaccaccacggtgtacagcacaccgggcacaaggctggccttgaagttgcgcttgaaggccttgcggtaggtcacccaccagtagcccgcctcgtcgcgcagcgcgcgcaggacggtatcgtacattccggccagtgcgggcccggccagcagaccgcccacggcggcgctgcccagcatcaccggcagactgttctgcaaaaagccgatatacaccagacagatgaccggtgcaaacccgatgcaggtcagcaggtttgcaaggaacatgccgttcatatcacggcctacaagctcaaaaaagcggccgatgccggtcttgcggggagcgttcttttcgacgcccttaccggccttgaaatcattggcagaaggaaaaagacccatagtaactgcggtacctctcttacgttttttaccggcaccgcagacgttttgtctggaaagtgccattgtgccaactttacagatataaatatacctgtattttgtcaactttgcaagatacaaccggggctaattgtaaaaaaatatttatctctcccttttttacgcaaaatgtgctacaatgacaatggcattttttgcaataggaggaaactattatgagcattcttcgcaccattgcgatgtttatttatctgttcgggtacatgatcctgcattacggcatcctgcgccgcgccgagcgcgccgcagccgccggagataccaccaccgtggagcagatcgtgaaccagcacatcccccgctggagccggggcatcctgaaggtaaccggtgtgtccctgtcggtggaagggctggagaatattcccaaagaccgcccctgcgtgttcgtggcgaaccaccgcagctactacgacatccctttgctgctggccgggctggaaaagccccacggcatccttgccaaggaggagctggaaaagattcccctgctcaaccgctggatgaagctgctgggctgcgtgttcgtgcagcgtgatgatgtgcgcgcctcggtgcgggcactgaacgatgccaccgccatcgtggagggcggccgcagcttcgtcatcttccctgagggcacccgctacaagggcgaagagggcggcgcaggcgagttcaaggccggtgctttccgcattgcggtcaagaccggtgccccggtggtgcctgtggctgtgaccggtgcccgcgccctgttcgaggcaaacggcaaccgctgccgcccgggcggtgtgcgcatcaagatcatgtcgcccatccagaccgccggcatgagcaaggccgagcagaaacagctgcccgacgccgtgcgccagagcattctggctgccctgaagtaacagcctttcccgctcgtttcatcacacaggagaactattttatggcaagctaccgttacgaacgcgacattgaccccaaggacctcaagccccgcaaggagcggcagtacagccgcagggagcgctgggcaaactggtgggactacaacctgaaatgggtgctcatcttcggcattgcgggtgcgttcgtggcgtactgctttatcgggcagtactttctgaccacccacccggattataacgtggcggtggtaagcccctactacctgcccgaagccaccgtcaccgccctgcaacagcagcttgccgcctacggcgaggactgcaacggagacggcaaggtggtggtaaagatcaaccagtacaccatggccttcaacagcgaggactcggacgcctatctggatatggcaggcaccaccaagctttccaccgatatccaaagctccctcagttccatctttatcctgtatgaccccgcaggcttccagcagaccaccggcacgttgcggtatctggacggtcatctgcccaagtccgatgccgacagcgactggtggaatatggtctaccgctggacggactgcccggtgctgaccgggatggagctgggcagctacacctcggacgcagtgcagagcgcaagcggcgacagccagcagctgctggcagattactatatcggcatccggggcgcatggctgaaggaatccgcttccctgctggaaaacagcgagcccctttgggcaaacctgaccgccggggctgtctccaccgccggggaggggcactaaagatgcgcttccgcatcaaagccggcggccccgccgcacgattcacctttgaccgcaccccaaagccccagccgcccgcgccgcctgttctccgcgccgcagaccttgataacccctatgggcgctattacggtaaagcccgcagctgggaggatattttgaaaaataaaaacagcgattgagaggctctctggtcatcgcctgcggcgatgaccagagagcctctgttttctatttttgtctttttacccatgactgatttgaaattttctccaccctcaaatggagggcggtttgttgtttctctgtcccggttatggtatacttactaggtatccccgcaaaaaccgaccaaaaaggatgtgacccccatggacgcactggaacaagcccgtgccgagatcgacacagtggatgcgcagctggctgcgctgttcgagcgccggatggctgccgttttgcaggtggccgaatataagcgggcgcacggtctgcccatctacgatgccgcccgggaggccgccgtgctggaaaaggccgcagcccgcattcagcagcccgcgctgcgcccttactataaagaccatgtccagcacatgatggatcttgccaagcagtacgaagctgccgtgctgggacgtaaccgcgccgcctatcagggggtggagggggcgtttgcccacatcgccctcaaagcgctgttcccccacgccgaggccgtgagctactccacatgggacgaggtattcgaggccgttgccgcgggcgaagccgctcacggcgtagtaccctttgaaaacagccacgccggggacgtttccgccgtgctggacctgtgctataaccacccggagctgtgggtggtggacgtgtacgacctgcccatctcccagaacctgctggtgctgccgggcacccagctttcccagctgcgcacggtatacagccaccagcaggccattgcccagagcgagacctttttaaagcagttccgtctgcccgccaccgccatggcaaacaccgccatggctgcaaagttcgtggcagaaagcggcgatgcgacaaaggccgccattgccagcgccgagactgccgccctgtacgggctggaaattctggtgcccaacatcaacaccgacggcgacaacaccacccggttcatcgtgctcagccgcgaaaaacccacggcgggcaaccggttctcgctgcttttcacggtggacaacaagcccggcaagctggccgaggtcattcaggtcatcggtgccagcggcttcaatatggagtccatcaagagccgccccatgccgcacgtcccctttgaatattatttttatgtagagctggtgggcgatgccgccgccggcgagaccgccgcgctgctgcgcgagcttgaccgcacctgccggacggtgcggctgttaggagtgtatacaaaatgagtgattttatcggaaccaagctgaccatgaatctgggcgagcgcagctacgacatcatcgtcaagcgcggctcgctggaaaacctgtatcagttcgcccggctggaccgccgggtggcggtggtcaccgacagcggtgtgcctgcacagtacgcccagatggtagctgaccagtgcaaggatgccaccatcatcacggtgccgcagggcgaagccagcaagagttttaagattctggagaccgtgctgcggcagatgctggacttcggcatgggccggggcgaccttgtggtggccgtaggcggcggcgtggtgggcgaccttgccgggtttgccgcttccatctatatgcgcggcattgattttatcaactgccccaccaccaccctttccatgatcgattcctccatcggcggcaagaccgccgtggatctgggcgacaccaagaacatcgtgggtgccttctggcagccaaaactggtcatcgtggacccggacaccctgtccaccctgccccgccgccacttcatcaacggtctggccgaggcggtcaaggccgggcttctggccgacccggagctgttctccatctttgaaaaagaggacgtggacgaccgcatcggcgacatcatctgccgcagcctgcgctttaaaaagagcatcgtggagcaggacgagaccgagcagggtatgcgcaaggcgctgaacttcggccacaccatcggccacggcatcgaggccgtgaagggcatcaagggacgccgcaccaccggcctgttccacggcgagtgcgtggcgctgggcatgctgcccatgatcgaatccaaggcgctgcaaaagcgggtgcgcggcgtgtaccgccgcttagggttgcccacccgcaccgcctacgataaggaaaaggtgctggccgagatgctgcacgacaaaaaagcgcaggacgggcagatcaccatcatcaaagtgcctggccttggctgctggcgcgccgagaccatccctgtggaggggctgcgcccgctgctgggcatggaggactgacccatgaaaaatacctttggcagcgacctttcgctgaccatcttcggcgagagccacggccgcgccgtgggcgcggtgctggacggcatggccgccggtgtgccggtggacgagagcttcctcgccgcctgcatggataagcgccgcgcccggggcgacggcctttccaccccccgggtggaggcggacgcggtgcagctgctttccggtgtggtgaacggccacaccaccggcaccgccattgccctgatgatcgaaaaccagaacacccgcagcggcgactacgccaagaccgccgaccttctgcgccccggccatgcggactttaccgcctacgccaagtaccacggctttcaggacgcccggggcggcgggcatttttccggccgggtgaccgctgctttggtggcgggcggcagcatcgtgcttgccgcattgcagcgggcaggcattgatatcaccacccacatcgcccggtgcgctggtcttgcagatacgccctttgcactggacgaccccgccgcccttgcggcacaggtggagacgcttgccagtaagaccgagggctttgcggtgttggacgccgccgtggaggagcccatgaaagccgccatccgcgccgccggtgccgagggcgacagcgtgggcggcgtgctggaaactgccattctcggcctgcccgccggcatcggtgagccctactttgacagcgtggagagcgagatcgcccatttggccttttccatcccggcggtcaagggcatcgagttcggcaccggcttcggttttgccgggctgcgcggctcggaagcgaacgacgccttccgcatgacggcagagggtgcggtggtcaccgccaccaaccacaacgcgggcatcaacggcggcatcgccaacggtatgccggtagtgttccgcaccgccgtcaagcccacccccagcatctacaagcagcaggacacggtggactacatcgcaaaaaaggacacgcagctgtccattcagggacggcacgacccctgcatcgtgccccgggccgccattgtgcagacctgcgccgccgcccttgcggtgggcgatctgctcaccgcccggtacggtgcccggtggatgaccgaccccaccggctaccggaaggagggctgagatggaatacggactgatcggcggcaagctgggacactcctactccaagaccatccatgagctgctctgcgggtacagctacgagctgtgccccctgcccaccgaggcagacgcccgcgcctttttgcagcggcggcagttcaaggccatcaatgtgaccattccctataaaaagctggtgatggagtactgctccttcatcgacccccgcgcccgcgccatcggcgcggtgaacacggtggtcaataaaaacggcctgctctacggctacaacaccgattatcttggctttgcccacctgtgcgaagcccacggcgtggagcttgcgggcaagaccgtgctcattttaggcaccggcggcacccacaacaccacccgcgcggtggcgctggataagggcgctgccaaggtgctgacggtcagccgcacccccgacccggaaaagggcgagctgagctacgccgaagccgtgcgcagcggtgcacaggtggtgttcaacaccacccccgccgggatgtaccccaatgtgggcgtgtgcagtctggacgtcgccgccatgcccggactggaagccgtggtggacgtggtttataaccccaacaagaccgaactcattctccgcgccgaggacgccggtgtgccggtggccgtaggcgggctggagatgctggtggcacaggcggtgtatgccgccgaatacttccttggccgcaagttcgaggacgccccgggcgaggtgcggcgcattaccgctgcgctgcgccgcgagacgctgaacatcgcccttgtggggatgccctcctgcggcaaatccacccttggccgcctgctggcaaagcagctgggcagaccccttgtggatctggacgaggagatcgtcaaggcagacggacgcagcatcccggatatctttgccgccgagggcgaagagggcttccgcgcaaaggaagccgcgcagatcgcccgtttcggcaaggaaaaggggcttgtgctctcctgcggcggcggcgcggtgaagcgggcagagaatgtccgcgccctgcgccagaacggcgtggtgctgttcatcgatcggccggtggaagcgctggctgtgggtggcaaccgtccgctttcttccagcgccgaggcgctgcgcaccatggaagcccagcgccgcccgctgtaccttgccgccgcagatgcggtgatttctaacaccggcacgctggccgagacgctggcagctgcacaggaggcactggatgaaatttttgattcttaatgggccaaacatcaatctggcgcgctggtctgagcccggcgtgccgggcgaggtggactacaccggcctgatggactatgtgcaggcgggctgcgaccagcttggcattgaaacggatatctgccagtccaaccacgagggcgacctcatcgacgagatccagtctgcccccgggcgggtagacggcatcgtgctgaacccgggcggctacgcccattacagtgtagccattctggacgcgctgcggctgtgcagcgtgcccgccgtagaagtgatgctggacgccccggacgagcgcgagcccttccgcaaaacggacgtggtgtcctttggctgtcaggggcattttatcggcgaaggcccgcagggctacctgcacgcctgcatctggctggcgcagctgctgcgcaccgacggctccagtaaggcgcatatcgtgatgtaaaacaaacaggaaaggaacgacctcccatgatcatctccaccaaaaaaggcgctcccaaagaggagctggaaaagatcgttgacaaattcgaaaagcagggtctggacgtgaccctgatcaccggcaaggactacaacgtgttcggtctggtgggcgacaccaccaagatcgacgagcgggacgtgctggcaaacccgtggatcgacaacgttacccgcgtgtccgcgccctataagcgcgcaaaccgcctgttccaccccgcagactcggtcatcgactgcggtggcgtgaagatcggcagcaaggaaaagatcgccgtcatggcgggcccctgcagcatcgaaaacgccgagcaggcactgcgcatcgcgcagggggtcaaggcgggcggcgcggcgctgttccgcggcggcgcctacaagccccgcacctctccctatgcttttcagggtctggagaccgagggcatcttagacatggtaaaggctcgcgaagccaccggcctgcccatcgtctccgaactgatgagcgaggaccgcatcccggagtttgaggagtatgtggacgtggtgcagatcggtgcacgcaatatgcagaacttccagctgctcaaggccgtgggcaaaatgcacaagcccgtgctgctcaagcgcggcctgtgcaacaccattgaggagtggatcatgagcgctgagtacatcatggcaggcggcaacgagcaggtcatcttctgcgagcgcggcatccgcacctttgaaaagtacacccgcaacacgctggatctctccgctgtgcccatcatccacgaaaagacccatctgcccatcgtggtagaccccagccatgccaccggcaaggccaatctggtagagccgatgatgatcgccgccgtagccgccggtgcggacggtctggaggtagaggtgcactacgacccccagcacgcatggagcgacggcgcacagtgcctgaccccggacgcctttgcacaggccatggcaaagtgccgtcaggtggcttgggctatcggccgggagatgtaaaccgtttaccccctcaggcgcggcgcgccagctcccccaagggggcgcctgaagcgctgcccggggaaaatctgcaaaaggataacaccgctatgcttgtaaccatcagaccttcccccggcggcatcgggggcgtgatcgccgcgccgcccagcaaaagcatggcgcaccgcgccgtgctgtgcgccgcgctggctgtggggcgctcccacatcacccatctggaattcagcaaggacatctctgccaccctgtccgctgccgcacagctgtgcgccgccgtggacaccggcgcggacaatgccactgtgcaggggcttgggcatttcctgcccctgaccgccccggtggactgctgcgaaagcggcagcaccctgcggtttttgatccccattgccagcctgaccggccagcctgtcacctttaccgggcgcggacggctgatggaacgcccgcaatccgtatacgaaacgttatatcgcgagcagaatctacggtttgagcagtccccagccgggctgaccgtggagggcgcactgacccccggggactaccggctggcaggcaacgtgtccagccagttcatcagcgggctgctgttcgcgctgccgctgctgcccggggatagccagctgcaccttattccccccgtggagagccgcagctacatcgacatgacccgcgccgtacaggccgcctttggggtgcacagccgctggctggacgaaaccaccctgctgctgccgggcgggcagcagtaccacccctgcgactacaacgtggagggcgattacagtcaggctgctttcccggcggtgctgggtgcagtgtgcggcggggtgaccatcaccggccttgcgccggacaccttgcagggcgatgccgccattctggacatcctgcgccggtgcggcgcggtgttcacccgcaaaggcgacagcgtcacctttgcaaaagcacccctgcacggggtggacatcgaccttgcggattgccccgaccttggccccgtgctgatggtgctgggactgctgtgcgagggcaccaccgtcatccgcaacgcggagcggctgcgcctgaaggaaagcgaccgcatcgcggctatggaagccgagctgcgcgcctgcggcggcgtgctggaaagcgacggcggcaccatcacggtgcacggctgtgccgggcttctgcacgcccctgccgcgcccctgcacggccacaacgaccaccgggtggtcatgagccttgcggtgctggctgctgccgccgggctgcccctgaccgtggacgatgccgaagccatccagaagagctggcccggcttttttgcagatgcagcgccgcttggcgtggaggtagaagatgcttgataaaacaaaacgttatctcgtagtgggtctgggtctgctgggcggcaagtacgcgctggagctgacccgcgcaggcttccatgtggacggcatcaaccgcagcgagggacatttgcagtacgcgctggagcacggctatatcgccggcggcaagacccacgattttgaggaccttgtccggcaggccgaccatatcatctttggcttgtaccccaccgcgctgctggactggttccgaacctacggttccctgctcaagcccgggtgcatctttacggatgtttccggcgtaaagaccggtcttgtggagccggtgcaggcgctgtgcccggcgggggtggagttcattgccagccaccccatggccggccgcgagacttccagcgtggagcacgccgccgaggtgaattttgccccggccaacttcatcatcacccccaccgaaaagaacaccccggcgggcatccagtgggcaaaggagcttgccgaggtgctgggcttcaagcatatctgcaccctgacggtgcaggagcacgaccggatgatcggctatgtcagccagctgtgccacgccattgccgtaagcctgatgtgcgccaacgacaactcctcgctgtgcgagtacaccggcgactccttccgcgacctgacccgcattgcacgcatcaacgacaaaatgtgggcagagctgtttttgtggaacaagcagaacctgatcagcgagatcgaccagttcgattccgctttgcaggagatgcgcgccgcccttgtggcagacgaccgggacaagctggaacagatgttccgcctttccacccagcgccgcgccgcctttgacaaaaagctgccggaataaaccgtgacggaggtattgccccatgcccaagcaggaaggacagaaatccaagctggtaacgctgctgcgcatccttgagcagcgcaccgacgagaaccaccgcctgaacgtgccccagctggtgcagctgctggaaaatcagggcattctggccgagcgcaagagcatttacagcgacattgacaccctgcgcagtctgggctacgacatccagctgcagcgggggcgcggcggcgggtactggatggccagccgtgcgttcgagctttcggagctgaaactgctggtggatgcggtacagtccagcagtgtcatctcggcgcgcaccagcaagcgcatcatccacaagctggaggccctctgctccgactatgagggcacccagttgcagcgtcaggtgtatgtggacggccgccccaagaccgacagccagacccttttgtacagcatcgacgcgctgcacactgccatcaaccgggggtgtctggtgcagttccgctacaagggcagcagcgccgtgcgcaccgtaagcccgtggcagctggcgtgggaaaacggctgctattacctgatcgcctatcaggacgaaaaagcacccccggtgcgccactaccgggtggaccggatggccggggtgctggtgctggacgagccgcgccgcggcaaggagttcttccgcaccttcgatttgcccgcctacctgcgcaagcacttcaatatgttcggcggcaccgagtaccgggtcaccctgcggtgcgctgccgaccttgagccggtcatgcgggagcgctttggccgggagccggtattctgcccggaggacgcagagcacttccactttgatgtgcccatctgcgtcagtcagcagtttttcggctgggtgtgcggctttggcggcaaggtagaggtcaccgcgcccgccgccgtccgcgctcagctgcacgagatggtgcagagccttgcggagcagcacgcataaaacgatttgaaatggcttccgctgcgctctagccat

SEQ ID NO: 13821 - DNA, 1537 bp, Unknown
  gut microbiota DNA sequence
ccagccgacccactgtctgttggaaaacgcagggttgaatatgccgtccgttgtgcaggcagagcagatcttcaccatcgacaaaagccgggcactgaagtatctggggcatctgaccccagaggagatgcgccgggtggatgatgcggttcgcatcagccttgcgctgaaccctatgggcagcatccagcagatagagcctatccggcgctctacggcggtttatgcgccgcctgaggtggtggatggaaaaccgcctgtctacccctatacgcccatccggtcgtcctttgagaacgccggaagcatcgaggaaatgatgctgtacaccgaactgcaatccgcggttcatgccatgatccagcggctcgaatatagcttcaccttcaatcccagcctgctcaccagcccgaagcggaagcagcaggtgactgagatcttagaggaagccgagaagtacatttggagaatcaaggaggaaatgcgatgcgcctgaacgacaacaatactttcattggtatcaacccgccgtaccagctttcggtcatccacagcagcaagctgatctatccccgcgagatctaccagcggggcgtagagcgcaagagggtggagctgattgcaagggacttcaacgagtacatcgttaacgagccgaaggtcagcttccgcaacggcaggtactatgtaatggatgggcagcacaccatcgagggctgcatcctcctcaacggcggcgaggaccgcccgatcctctgcaaggtctacaccggtctgacgatggagcaggaagccctgctctttgccgagcagaacggtcacgccgcacccctgtcggcgggcatcaagctgcgcgccaaggtggtgggcggcgatgcgccttccaaggcgtttgtcgcagccactaaccgggcggggctttccctcaactacgacagtatgcagctgagcgactaccgcatcggctgcgtgggcacggcgctgaagctgtacgaccagctgggcgaagagatctactgcgaagctctgcggcacatcgtggaagcgtgggagggcaaaccggattccttccgggcggctgtcctgcggggcgtgatgtactttgtgcagctgtatcatgggcagtacagcgaggagcggcttgtccgtgcgctgagcggcgtccatcccatggagctctaccgtgtcagccgggataaccccgccaagcttccgggctggcggcggtacgtttaccccatctacaccacctacaacggcaagtgcaggaaagacgcactaccgatgaagttctaagctcaaatatctcctttggcaagtgagatggtccccgaaaaagaccatcacactttacatatagtattttctgctgaataatcgacatattgaactagaaagagaggacaggaatgagcgagatcgcagcctgcactttgattcaggaagagcctgaccgaaagacggagaggtatctgacgatgttcaaggactacccggatgtggtgacggtggagcatcttcaggaaatgcttggcat

SEQ ID NO: 13822 - DNA, 6532 bp, Unknown
  gut microbiota DNA sequence
cggcggccattcaaaatcgtcccgttttacgcctttttcggcttcagccagccgtccacggcggctaccagtgccttgccccgatggcccagcaggcggggcagcagcaccctcgccatggcccatacgcccgcaaagttgtacaggatgataaccagcgtgatcagccctgtccacagtccgtacagcggcggctctgccaacagcacaaaggcctcaaacaccagcacagcggcatttgccagcacccgcgccgggtggacgcgcatcccgatcatgcggcgggcgtccaccgcacgcagggtgaacaccagcgcaaggccaaggaaggacgcataggtcgcgcccacaggtccccacagcttgatgaagaaatagttcatgatgcagttgctgatggcacccgccatcatggtgaccatgctgcgctgcgactttttggtcacaacgtacacgctgttcatgaactggttgaagcagctgcaggtggaagccagcacgaggaacggcacaaagtgccatgcgtagtaatagttggacttcatgacgtgcatcaccgggcggcacagccagataatacccgccgcacagcagaacagcacactggaataggtgcggaagatcttggtaaagaaccgggcgcgctcctcctcctcggtgacggcggaaagctgccacgcatcgtagaagatcagacccagcgtggtcaggatggtgggcaggaagtagccggtggaaagcaggccgctccatgcgttgccggtgcggccgtccagcccttcgcacatttcgcgcacaaagaacaggtcggaagcattgatgatccagaagctgatctgtgccgggatcatgggcagcgagaagttgagcatctgccgccacagctttttgttgacgcccttcagctccacatagttccacagcttgccggtgaacagcaagaacagcacgctggtcaggtcaccgctgataatggccagcaggtagccgttggcgccccacttgaagcccaccagatacagcacataaaacgccatggtagccacggtgcacagcacgccgtccaccgccaccagcttattccactggcggctgcgcacgaactgagtgcacagggtgcgcaggcagctcatgagcacataaatgtagatcagcaggccgtactgcgccatatccggcaaaaactgggtgaccggccagcacagcaccagaatgccaaaaccgcccagaatggtcagcaggccgttggtaaacacctgcttttcgctgttgcccttgtccagaccaaagcggatgatggcgttggacatgcccatggacacaaaggggatgagcaggtttgcgtactggctcaggatcttggacagacccagatccgagatctccgccatggcgtaggtcagaaagggctgtacgatcaaagtgagcagcttggacgaaaagctggagatcgcaaagatcagggtattgccggccaatttggaatatttatcgccggtctttttttcgttttccaagggaatttccctccgtttttacgatagattatcttttcagcagctcccgccgggctttccagtccggcagcagcttttccacctctgcccagaaagccgggctgtggttcaactgcaaaaagtggcagtactcgtgtactaccacatagatctgcgccgcaggaggctggttatacagctgcaaggcaagggtgatctgccgcttagccgggcagcacacgccccagcagcttgtcatgctgcgcactttcaggatgggcttctgcccgcccagcaccccggcaaaggccgggtagaccttatcgctcatggcggtaaagtaggccagcgccgtggccttgtccggcaggtcggcgttgtccttgttgagcttcgtgatattcttcacccgggtatcccggatccactgggcgttttgcagcacaaaacggtcagcctgctccagactggccgtcaaagggatgcttaccatcacggtgccgttgctgcgcacccgcagatgcagctgctttacctttttgcgcaccagctcgtactggatgccctccacgctgcgcagctgggcgcacggctttgccggcatctcaggccttgctccgcatcaggcggccaaggggcagctgcgccagcaccacggcggcaaacagcagcacgcagccggtagattcccggaaggagaggttctggtgcagcagcagccagccgcccaaagcgctgaatacgctttccagacacatgatcaggctggccaccgcggggttcaggtcccgctgacctaagatctgcagggtgtaggccacgccgctggacatcacgccgcagtacaggataggcccggcgaaggtgacaaattctgccatggcaggctgctcgaacaaaaacgccgccacggtgctttccaccgacaccacaaaaaactccacaaggctcaggcgcacgccgtccatctgcggggagaaatgatccaccgccatgatctggaagctgaacagcaccgcgcacaaaagcagcagccagtcgctgctctggatgctgccaaagccatccttcatgcacagcagatacagccccaccacggcaatggccatgctcacccacagctgtgcgctgcccttgcggcccagaaacaggccgaacaccggcaccagcaccacatacatggcggtcaggaagcccgcctttgcggtggaggggtccagcgtgatgcccagctgctgcgccgcgctggctaaaaacagcagcgtgccgcacacaagcccggctttcagcagcagcttgcgctctgccgtcgttttgggcttgccgtccggcctgccctgccggtggcgcaaggcgtcaaatgccttgaccgtggggatcagcaccagaaccgccatccagctgcgccctgccagaaaggagaacgcgcccatgccggagccggcgctctgcgccacaaaggctgtgccccagatcagggcgcacagcatcagcagcattgaatttttcgtctggttcgtcatccggcaatgccctccaccttcatcaggccgtacaggtagtaccggctggaatcataggagatggtcacacggtactgcgccgccgggtccagcccggaaatggtgcaacggtagtcggtgccatcggtcttgatatagtaggtgctgtccggcacatactctgcgccgccgtccacctttttccacagtgcaaccttgaacttctgggtaccctcggcggtgccgcaggccatgatgttcacactgccgcccggcacagtaaagtagccggtgttgcggctccagatgccgttgaacaccgcgtacaggcagccgtctgcggtggcggtggcatactttgccgaggcatccgcaatgccctgaatgatcagcgggtcggtggtggcttccgcccagcgggtggtgtcctcctcctgcacttcctcggagtggccggtcaccttctgcgctacctttttcagggtctccttgcagccggtcaggctaagcaccatcaccgccgccagcagcaatgccaaaagctgttttttcatcttcatagctttcctcatagaaacaaagaaacttttctttttcgtgcgtctctgccaacaggcagatacagggtaagtataccgcattttgccgctctgcacaagatacctgtatttattttgtgcggtttgccgcctgtttctgcacaaattttcacccattcagcgcccgcagcgccgcgcactcggcctcggccagcgcgggtgcctccgccccgaacaggctgccgtagcggtacagcgcccagccgcccgccgcctgctgccgtaagtcctttacctgcgccgccagcgcgctgccagtgctccagccggacacgctgtccgggttcgcgccgccatccccggtgcccacccggtacgcgcccagcccgaagtacagcgccacatcccccgcccgagggtagctaagccacgccgggacgatgttttcaaaggcaaagcgggtgctgccggagtgcagggtaaagccgtagccccagtacacctgcgggcagaggtagtcgatgaccttttcctccccgcccgccgccagccacgcggtcacatcgctgtactgctggtcgaggtcgttgtccgggttgccctgcgggctgatgccgaaccgcagggtggggtctgccgccttcacggtgcggtgcaccttcgccaccagcgcggtaacgttctgccgccgccacgcggcaaggtcggctgcgccgcttgccgcaaactgcgccgcgtccacagcggcatcggtggtggggtaaaagtaatcgtcaaagtggatgccgtccaccgggtagttctgcacaagctctgccaccccctgcaccacatagtctgcggcggcagacacggcggggttcaggtacagcccctccccggcggtgcacagccagtccgggtgagtgttggccagattattctctgccagattcggcggcatcgccgccgaggagcgcaggcggtaggggttgacccacgcctccaccccgatgccccggcggtgcgcctcggtcagaaagacatccagcgggtcaaagccggggtccttgccctgcaccccggtgcacagatggctccacgggaacaaactgctgcggtacagcgcatccccgaaggggcgcacctgcgccaacacggtgttcagtcccagcccgacgcagttgtccagcagctgcgccgccccggcgcggaaggtgtcctcggtggagaaatccagcagcgcccagtccagatagctcacccacaccgcccgccactccccggcgggcagggcggggttgggtgccgggggcgtatcctgcccggaggcggcggtcttttctgcgttgcccttttgccgcagataccaccccgccaatccgcaggcggcaacgcccgccccggtcagaaaggctctgcggccaaagcggcgttttgccttggctttagacgtcctgcggcgctgggtcacagggtctcctcctgcgtcttatacagggtaagccccgcccagccccgggcgcaggtcagcagcacgaacatgatattcgtccagaaggcaaggccgctcatgcccgcgtacttggtcagcatccagaacaccagccgcagcacctcggcggcgctcaccagctgcaactgccgctggatgggcttgccgcgctcgtactcggtggcaagcagcgcaggccacaccagcgccgagcagatatcccccgcccagccgctggcacccagcttgctgagcatcagcaccacgaacacgccggtgtagttgcgcttttcccttgccggtgcgcccttctgcgctgccagaaacagcactgcgatgccggtaaggcagaatacgatcatttccagcccggaaaaatccatcccgcccagcacggcaaagccgcccagcatggacaccgccgctgcagccagcaaaaagaaataccatgtcttgcgtgtaaatttaagcttcatgaagccctcccccgggcgtttgcgcccggcttgcagaaaaatttaaaaaagaattgtaaatattatagcacaaacccccgcaggttgtgttacaataaggaaaactcttttggggagggtctttccatgaacgctgtcgtttccgtctgtcttttagcctgtgcgctgggcatcatcgtgtacctgctctcccggcgggagacaacccgccgcagccagtacggccccgccggcctgtccgagttccgcaccggccttgcgctggacgagtgctttgaccgtctggacacccgcagcgacaccgacctctttacctacgagtgccgccgggagaacgacggcagctttctgctgcacctgacgctgcaccagcccagccagcagccgctggacaccttgtacaccctgcggctggaccccggccgccagaccgtggtgaccctgatctttatccgggaggcttttggctacaaggagccgctgttcccgcccgccatgctggacgaatttatgctgcaaaagctggatgcccaccgcaccaaatgatttttgcggaaaatgctttcctttttgcgcagtttttgttatactagtgcgtgttgcagcaatgcagcacccctgcgggccagtagctcagctggtcagagctggcggctcataaccgcttggtcgcgggttcaagtcctgcctggcccatacgaaaaaagacaccctttcgggtgtcttttttgtatttcaagggcttttattccccatcctctgcgggcagctggttccacaggcggggtacatatcacagagcacatgatacgctggccgtttttgtttgcccccattgcggcagatcctgctttctgccgcaaattgcatcagatcccgccgtttgctcaatgagtatttcccgccgtcccgttatactgggagggaaatggaattaaacgatggaggaacagaccatgaaatacggtgtcatcgatgtgggtggcggcctgcggggcatttacggcgctggcgtgctggaccgctgcctggaggaggacctccg

SEQ ID NO: 13823 - DNA, 6816 bp, Unknown
  gut microbiota DNA sequence
atattgtcagagcgtaagcggagacaattctaaatcgttttttaccggaatatcaacctgaaaaataaaggagaaaaactatgctgactagcaaacagcgcgccattctgcgcggcaaggcaaataccatggaccccgtttacatcgtgggtaagggcgagatcgacgagaccctgatccagggcgtcaaggactgtctggacgcccgggagctcattaagctcaaggtgctggaaaacagcatgtacaacgcccgcgaggccgctaccaagctggccgaggccaccggcgcagactgcgtgcaggtcatcggctccaagttcgtgctgtatctgcagaagaaaaaggacagcgcctacgctgccctgctgaagtaagatgaaaatccttctctatggcggcagctttgacccgccccataacggccacctgaataacctgcgtgcagcggcagaccgtgtgcacccggataagatcgtggtgatgccggcaggcacctctccttttaaggaggggacgaacgcctccggtgcgctgcggctggaaatgtgccggtgctttgcggcactggcgcaggagccgggtatgccgccgctggaagtaagcggctgggaggtggcgcaggccgcagcgggcagccgcaattataccgtgctcacgctggaaatgctggcaagggaaaatccgggcgctgtgctgtaccttgccattggcagcgatatgctgctcagctttgagggctggcaccgctggcaggatatcctgcaccttgcgcgggtggtggtcacaagccgggatatcggcgatgccccggcgctgcacgcaaaggcaaagctgctggacccgtcgggcggacgcatcctgtttgcccccgtgcaggcgctgcctatggcaagcagccagctgcgggcccggcttgccgccggagaagagtgcaaaaccgaactgccggaggaagtgcgcgccgtcatccggcgggagggactataccggaatacagaaggaagtagcagataaatggagctgaaacaggcaaaggagcttgtgcgcagccggttgagcgataagcgctacgagcataccatcaacgtgaaaaaaatggccgtcaagctggccaagcactacggcaccgacccggagcaggccgcactggcggcgcttttgcacgatgccgccaaggaactgcccaaggacgagatgcgcgccatcatgcaggcgtacccggaatacgcgcagggcggcgaagcacgccccacgccggtgtggcacggcatctgtgccgccattctggcgcgtaccgagtggggtgttacggacgaagccgtgctcagcgccattgcctgccataccgcaggcaaggcgggcatgacccagctggataagatcctgtatctggccgatatgaccagtgccgagcgggactggcccggggtggagaagctgcgcaagctggaaatgaaggacttggacgcagccatgttggcagcgctccggcagacgaacggttttgtgctgtccgagggcaagcccttagaccccgaaagcaaggccgcctacgaggatatcttagcgcacagcgggcagaatgaagggtgaagagccggatgccgattaaaaatggttccggacatccccggataaaacaattgcagattttgccgtaccatgctatactgaaggatatgacaggtctgcaggtgaaaaactctgcagagcagtgaaaagctggaggatacaaaaagcatgagccaaacgccacgccatatcaatacagaccgctcactcagccgcccgggtcaggcggcgcgcgccccgcaggctgccccggagcagaacacccgcagcaccgccggggcacagcacgccccgccgccccgccgcccggcacagcccgacatgggcgggaatggtgcaccgcgccgccgcaaaaagaagaaaaagaccccgctgtggctgccctttgccattgtgatgggggtgatcgccgtgatctccggtgtggtggtgtacggtgtgagccttgtgaacaaggtggaggacagtatccgcccggcggaaagtgccccctccatcgtacaggagatccagaccgccgaggagtacaagggtgatgtggtcaacattctggtctgcggcatcgactttgaagagggacgctcttacagcgacgccagttccaacgacggcatgacggatatgatcctgtactgccagttcgatatcaagggcggtgcgctgcggatgctgcagatcccccgcaacacgctggtgaccacccagaaccgcaagcttaccctttccaacggcaagacctatgccgtttccaactaccagatcaactcggtggcgctttccaacggcggcagcattgccgcgctggcagatgtcatttatgaccagtaccacctgcccatcgactactatgtcaccattgatatgcaggcgctggtggaaatggtggataacttcggcggcatcgaggtgtatatcccccgggatatgtcctacggcggcagtaagctgctgaagggctaccgcaatctggacggtgcctcggcagagttctttgtgcgctgccgccacggcgacggctacgcaaactccgatatcgaccgcttgaatatgcagcgttacttctacgcaggtctgttcaagcgcgcccgcgccatgggcattaccgatatcctgaaccagctgccgctgatcttcaaggactatatccacacggatatggatatcaccaccatcgcaaagctgctggcgtccttcctcaagatcgacagctccaacatcattctggcgcagacgccggtgttcatgggcgtgcccaacgtgggcaagactgactcctttgccggctactcctgcgtggtgccggatgccggctccatcgcaaacctgctcaaccagtatttctgcacctacaccggcccggtggaggtaagtgagatgcacatggtcaccgaccagtggccccacggcagcgcatccaccgatgccaacgtgcagtatatgggacgcatcgataaggaatccgacgacgccatcctcagcggcgataccgacctttccggcgctgtgaccaccgatggtcaggcagcgggcaccggacagtaacaacaaaaacaaggccctgcacaccgggtgcggggatgttccgacagaagggagaaacacatggataatttcaacgacagcaaggcgcttgccattgagatcgccaagatcttggacaagaagaaggcacaggatgtgcgggtgctcaaggtggaaagcctgaccgtcctgaccgattacttcgtcatcgcctccggtacctccaccacgcaggtggcctctctggccgacgaggtggagtacgagctttcgcagaagggtctggaaccctacagcgttgagggtcacgacaccaagaactgggtgctgctggattactccaacgtcatcgtgcacgtctttgtgcccaacagccgcgcttactatgatctggagcacctgtgggcagacggcgagccggtggacatctcggagtacctgaccccggatagcagcattgaataattaaggcaaacaggtctaccttcggtaaaagtcctctttgttattgcggcacaatagggaaagttagcaaaaacgcccccttgggggagttggcagggcgaatgccctgactgagagggtttgtaccggaagtaccttaaaagcatacacgcccccaagcaacggtattttggttaaagtctggagctgattacaaacatgaagtatgattacaaggctgttgaagccaagtggcagaaggtgtgggaggacgaaaagaccttccacgtcgagatcgaccacaaaaagcccaagttctatgcccttgtggagttcccgtatccctcgggtgcaggcctgcacgtcggccatccccgcagctacaccgcgctggacgtggtaagccgcaagcgccgtaaaaacggctacaacgtgctgtaccccatgggctgggatgccttcggtctgcccaccgagaacttcgccatgaagaaccacatccacccggccatcgtcaccaagagcaacgtggatcatttccgtagccagctcaaggcgctgggcttctcctttgactgggatcgtgagatcaacaccaccgaccccgagtactacaagtggacccagtggatcttcctgcagctgtacaagcacggtctggcctacaagaaggaaatgaacgtcaactggtgcaccggctgcaagtgcgtgttggccaacgaggaagttgtcaacggtgtgtgcgagcgctgcggcagcgaggtggtgcaccgcgtcaagagccagtggatgctcaagatcaccgcttatgccgataagctgatcgacggtctggatggcttggattacatcgagcgcgtgtccacccagcagaagaactggatcggccgcagccacggcgccgaggtgaacttcggcaccaccgccggtgacaccctgaccgtgtataccacccgctgcgataccttgttcggtgctacctacatggtcatctccccggagcacgctctgctcaaggaatggctggaaaagggcatcatcaaaaacgccgatgccgtcaaggcttatcaggccgaagctgcccgcaagagcgactttgagcgcagcgagctgaacaaggaaaagaccggcgtgcagctggacggcgtgatgggcatcaacccggtcaacgagaccgagattcccatcttcatctccgactacgttctgtccacctacggcaccggcgccatcatggccgtgcccgcccacgatacccgcgactgggagttcgccaagaagttcggcctgcccatcattgaggtggtcaagggcaacgccccgtccaatctggatgaggctgcctttaccgatgttgccaccggcacgctggtcaactccggcttcctgaacggcctgtccgtggtcgatgccaaaaagaagatgatcacttggctggaagagaacggcaagggccgtgataaggtcaactacaagctgcgcgactgggtgttcagccgtcagcgttactggggcgagcccatccccatggtgcactgcgacaagtgcggctggcagcccctgcccgagagcagcctgccgctgaccctgccggacatcaccgactttgagccgggcccggacggcgagtccccgctggcacgccataaggactgggtcaagaccacctgcccctgctgcggcggccctgctacccgcgagaccgacaccatgccccagtgggcaggttcttcctggtacttcctgcgctatatggaccctcactgcaaggatgctctggcctccaaggaagcactggaatactggtctccggtggactggtacaacggcggcatggagcacaccaccctgcacctgctgtacagccgcttctggcataagttcctgtacgatatcggcgtggtgcccacggcagagccctaccagaagcgtactgcccacggcatgatccttggcctgaacccccacagctttgtcaacctgcccgccgaggaacaggagaagctgctcaaggagtacggcagccagaaggccgccgagaaggcactggaagagaagtacggcgagatggcacgccatcccatcgtgaagatgtccaagagccttggcaacgtcatcaaccccgacgaggtggtggaccagtacggtgccgacaccatgcgtctgtacgagatgttcatgggcgactttgagcaggctgcaccgtggcagacctctgccatcgcgggctgcaaccgcttcctcgaccgcgtgtgggcactgagcgacaagctggtggagggcgaaggttaccgccccgccatggagaccctgatgcaccagaccatcaagaaggtcagcgcagatatcgagagcctgaagatgaacaccgccattgcccagctgatgacgctggtcaacgccatgtatgacaacggcggcgcaaccaaggccgagtttgagacgctggtgcagctgctgaaccccttcgctccccacatgaccgaggaactgtgggagaagctgggtcacagccacgacgagcagctggcctactatccgtggcctgcctacgaggaagccaagtgtgtggaggctgctgtggagatcgccgtgcaggtgaacggcaaggtgaaggcacgcctgaaggtgcccgcagacatcaccgccgaggacgccattgccaccgccaaggcagaccccgctgtggctgccgcgctggaaggcaagcagctggtcaaggaaatctacgtcaagggccgtctggtcaatctggctgccaagggctgagaactgctgctccgctgaataagcgcgaacatatcatcacccgcagaggcggatttagcgcaggaaacacccgggagcgtctgttcaaaaatctttcaaaagttttgagcaaaaactttcaaaaaaaggttgacgaaccggataaaatgcgctatactgtctactgttagttaccatgtaacaacgaaattcctgcctcacggtccaagggagggaataagatgtcggaaattcgtgttaaagagggcgagtcgctggaaagcgcactgcgtcgcttcaagcgcagcactgctcgcagcggtgtgctcgcagaggttcgtaagcgcgaggcttacgagaagccgtctgttaagcgcaagaagaagtccgaagcagcccgcaagcgcaagttcaagtaattgattgcttggaatcgcacgttgctttagattttaaacgcgttgctaacgccgatgtaggggagcctgttatacaggttcccctattttcattttaaagctgctttgc

SEQ ID NO: 13824 - DNA, 2676 bp, Unknown
  gut microbiota DNA sequence
gaatggcttgccgccaagggcatcacggctctggtgctggatatcgacaacaccctgaccgcagaccgcaatcaggagctgccggaggaggtggccgcgtggcttgccgccatgcgcaaggccgaggtaaagctgaccatcgtctccaacggtgcggaaaagcgggtgcgcccctttgcggaaaagctgggccttgcctacctgtaccgcgccgccaagcccctgccttttgcgctgatggtagcacagcaccgcatgggcgtgaagcaccgccagatggccatggtgggcgaccagctctacgccgaccgcatggtggcggcgctgtacggcattcccgggctgatggtcatcccccgcgggccggacttgggcgcacaggtcatcctgaaacgcaagtgggaaaaaaagcactggcaaaagtactacgaccggggaggtaagaccctatgagtgaagcttggaacatccggttcggcaccgcaggcaccagcgacagctttgccgcccaaggctacaaaagcagtctggatgtgccggagtacaccgccaaaatgggactgaatgcctttgagtaccagtgcgggcgcggggtgcgtctggggctggacaaggccgcccgcatggctgcccttgccgcccagcgggatatcctgttcagcgtccatgcaccttattatatcagtatgtccagtttggaggaggacaagcggctgaacagcatccagtacctgctgcacagcgcggcggtgtgccgggcgctgggcggcagacgcatcatcttccactccggcagctgcggcaaacagagccgggaagctgcgctggaaaaggcgctggataccatgcgccgcgccgtggctgcgctggacgaggctggctttgaggatatgaccctgtgcccggagaccatgggcaaggtagggcagctgggcacgctggacgaggtgctggcgctgtgcggcgtggacagccgcatcaccccctgcatcgacttcggccacctgaacgcccgcacgctgggcggtattcagaccaaggcggactatgccgccattctggaccgcatggctgaggtgctgggcgatgaccgtgcccggcagttccatgtgcacttttcccgcatcgagtactcggcgggcggcgaaaagcgccattggacctttgccgatactcagttcggcccggagccccagcccctgatggagctgctggcagagcgtcagctgacgccggtggtcatctgtgagagcgcgggcacacaggccgaggacgcgcagacgatgcagcaaatgtaccgcgcagcgcggaatgcgtaaaagattttgtgtttttatcgtcttttttgcccaaaccccttgccaaacagggacagattgggtaaaataaatagagatatgcgttaagcatctgagattaaatttatggaggaattcctatgatttctgcaggcgagtttcgcaatggcgtgacctttgagcaggacggccaggttcttcaggtcgttgagttccagcacgtcaagcccggcaagggcgctgcctttgtccgcaccaagaccaagaacgtcatcaccggttctgtggtcgagaccagctacaaccccaccgctaagttcccgcaggctttcatcgagcgtaaggatgtgacttacagctacgaggacggcgatctgtaccacttcatggacaacgagacctacgatgacatccccgtcaacgcagccgacgtgcccgataacttcaagttctgcaaggagaacgagctgtgcaagctgctgagctacaagggcaaggtgttcagcgtcgagatccccaacttcatcgagctggaagtcacccagaccgagccgggtgtcaagggcaacactgctaccaacaccctgaagcccgctaccgttgagactggcgccgagatccgtgtgcccctgttcatcaacgagggcgatcacatccgcatcgatacccgcaccggcgagtatatggagcgcgtctgatcatttgtcgcataccgggcagcgggcaaccgtttgcccggtttttgtattacaaataaggagggcatttcagatggaactgaacaagaaagcagcctacctgcagggcttagtggacggtctgggcgtggatgagagcaccaaagagggtaagatcatcaaggccatggccgctctgctgggcgagatggccgatgccattgccgccatggacgaggatctgacccacgcctacgaccagatcaacgatctgagcgaggagctggaggatctggaagccgacctgtacgaggacgaggatgccgaggacgaggacgacgacgcagccgacgaggatgaggatgcgggagatgacgacatcgccagcgagcccttctacgaggtagcctgccccgcctgcggcgagactgtctacgtcagcgaggatgatctggatgcaggcgaagccaactgcgcccactgcggtgtgacttttgaggtcgcgctggaaggcgacgaggacgaagccaaggacgcccccgtgcagtacgaggtgacctgccccgcctgcggaaagaccgccgtatttgaagaggacgagctgctggacggcgcacccaagtgccccaactgcggcgagccgctggactttgaggtgaccgaggagtaagattttctcttattcttgtgaaaatgggatc

SEQ ID NO: 13825 - DNA, 1404 bp, Unknown
  gut microbiota DNA sequence
aatcgcccggagttccagcagatgatcaaagacagcggcaagaagctgtttgatgttgttctcgtctggaaatttgaccgctttgcccggaaccgttttgatagtgcaaactacaagatggttctgaaaaagaacggtgtccatctgatttctgttatggaacccattgccgagggttcacagggcattctggtggaaacgctactggaaggcatggcggaatactattccgcagagctgtctgaaaaggtgattcgtggtcagaccgagaacgccctgaagggtaagtgcactggcggtacgggaactatcggctataaaatcgacgatgacaagttttatcatcttgacccgctgaccgctccgctggtgctggaagcatttcagcggtatgacaacggcgataagatggtggagatcgtaaacttcctcaacgacaagggcgtccgcaatatgctgggcggcaaaatgacccacagcagcgtgaatactatgctgaagaaccgtcggtacattggggaactgtctttccgggatatcgttgtgccggatgcaattccggttattgttccgaaagaactgtttgaccgggtgcagaagcgtctggataagaacaagcgtgcccctgcctgcggcaaggcagacgaggaatatctgctgaccaccaagctgttctgcggcaagtgcggtgcgctgatgttcggcgaaagcggaaccagtgccaccggacgcacctactattattataaatgcgccaacgtcaagcggcgcaaaggttgcaacaaaaagaccgtgcagaaggactggctggaagatctggtcgtccgggagaccatgaagctgattcaggacgatgcggtaatcgacaagatcgttcaactggtcatggatgtccagaatcaggagaacaccacgatcccgctgctggaaaagcaactgcgagaggtcagcaaaaagctggacaacctgatgaaggcaatcgaggacggcttgtacacccggacaacgaaagagcgtctggaagcgctggaaatccagaaagatgagctgactgcaaaaatcgcagacgaaaagttgaagaagcctagcttcaatgaggatttcatccgattctggctgatgaaatttagaaagttcgatatctcgcagaagaaacagcgaaaagcgttgattgaaatttttgtaaatgccattttcctgtacgatgaccggatgttgatcacgttcaactacaaggatggcacccaaaccgtccggtttgaggacactctaactgccgattcggtggaggaaaaaagttcggatttgtccagctctgctggaccataaatccaacgatttcacgttagaaatcgttggatttttttgtttataggctggcctcatttggttttgaccacaatt

SEQ ID NO: 13826 - DNA, 216 bp, Unknown
  gut microbiota DNA sequence
tgccccggaagacccttatcgctgggataaaagagcagtaagtttgattctggaacgccgggagtacactggctgcacagtcaacttcaagacctatactaactctatctgggataaaaagagacatctgaatcctgtggaaaatcaggctatcttcccggatacacatgagcgcattattgacgatgatgtgtttgaaaaggttcaggagattcg

SEQ ID NO: 13827 - DNA, 11773 bp, Unknown
  gut microbiota DNA sequence
caaggcagctgattccagcgatgccaaaggtggccgcaaaggtgatgcccaccgccagcaaagtgcagcctgcgctatggcgtttttttgcgctgatacggatgctttccaccggggtcggctccggctttgcaaagatctgccggaaccagccgggcatcccggcggggtcggcatccgcagcaccttcgcggaaaggctgctttgcatccccgtagggataacctctgcgcccctgccggaaggcctttgcggcctctccgataccgtagttggctgcatggacagcggctttgcccacatcccacgcccggtcaccgatgtccatgcccctgccctcaaagccgtgggcaaaggcatcggtcatggtgtcgccaaaggcgcgcagctggtcttccagctcctgctgtacctgtcggccttcgttattatttcggttatcgttttcacgatcgtacatcaaaattttctcacccttctgccggtgcataccggctgatgatggcgcgggccacccgcagaccatccacggcggcgctcataatgccgcccgcatatcccgcaccctcgccgcaggggtaaagccctgccagctgggtgcacacaaagtcctcttcccgcttgagccgcaccgggctgctggtgcgggtctcaaggccggtcaggatggcgtccggcgcagtgtagcccgcgatcttgcgctcataggcgcgcagacccgctcgcagggtatccgccagctccccgggcagcagtgcgcccagatctgcggcagtcacaccgcggtcgtaggtgggctgtacgctgccaatatgcagctgcccgcgcccttccagaaagctttgcacattctctgccggggcggcgtaggctccggcggcacgaccggcggcataggcttttgcttccagctcccgctggaaggcgatggcgcggcgggggtcgtttgcaaagtctgccccgcccacgctgaccaccaccgccgcattggcgtttttgccgctgcgggcgtggtagctcatgccgttggtcacaacacgctcttcctcactggccgaagccactacctgaccgccgggacacatacagaaggtgtacacgcaccggtcgccgacgtgctgggaaagctggtattcgccccggggcagtgccggatgtccggcagcttcatggtacaggcttttttcgatctcgctttgcaggtgctcggcgcggaagcccacgctgaagggcttgcattccagcacaaggccgctgtccatcagcatgctgaaggtgtcccgtgccgagtgccccaccgcaaacaccagcgtctcgcaggcaaagctgccgtttgtagtagtgatgcccacaagtcgtccgttttttcgctccagtccggtgagcgcggtgttgaagtgcacctcaccgcccagagactcgatctctttgcggatggaggtgatgacgccgcgcagcaggtcggtgcccacatggggcttttgcttccatgcgatctctgccggggcaccgtgctgcaaaaacacctcggtgacaaaatcacacagttcatccccgatgcgggtggtcagcttgccatccgagaaggtgcccgcgccgccctcgccgaactggatgttggcgttggggtccagctgaccggtggcggaaaagtgctccaccgcctgcacacgggcatccagcgcagggccgcgctccagcacgatggggcggtagccctgccgtgccagcagcagggccgcaaacagccccgccgggcccagtccgcacaccacagggcggtgcacaagcggctgggtacctgcgtgcagggtaaagtctgcccggctatgcagggcggcgtccgagcagcgggctgcaagggcggcctcctccccgggctgcttgagggtgaccgccacggtatataccagcttgggctggccgtggcgggcatccaccgaaagctttgccacgccggtgtgctctaccttgctgcggggcacccgcagggtgtgcagcgccttttcaaatgcctgcggctctgcggcagagaggggcagacggatgttgcgaaccagaatcatttgttgtgttttcctttaaatttagttgctttcaatgcggcattgcagcacatagctgcccagtgcaaagatcttgccgttggagggtacatacagccggcaggcaatgttctgttggccggtagccacggcaaagtcctcggcgtcgatctcaatgaccacctgctcgggggtcaaagtctccatagcacccttggggccgcagaggatcacgttcatcagccgctcggtctccaccgtcagctgataggtggcgggcagattgaccacctgcacacagctggagggcaggttcatggtcttggtctccagcccggagcagtcaaagctgaccgtgatggtggagatattgtccagcagatagatatctgtcggcagctcgatgggcatctcgtacaccttgttcagactgaatgtggaaaggtcgatggtgccgatggacaaggtggacagtgcatcgatcttttctgccgggcccgctaccttgagctgcttgcagctgagggcatagctcagcaccgagttatcgaacccgcgcggcgcgttgataaagttcaccttcaccggcagggtcgccgtcttgtacacttgcagcgtcacgtccacattgctttcttccagcgtggtgtactggaacttgacctctttgccgccgctggtgtagaagcgcagaggggtgttcagcgtgaccgactcggtcagttcgctgctgtaagatgcctcggcggtgcaggtagccaccttgctcagctcgctgctggggccggacagggtgacggtctccttggagacctcggtgctgtaaaggatatagccgtctgcaatgcgcagatagttggtggtagcggtaacgggcagggtcttttcctccaccacgtcaaacaccacatccaccgtgttgtcgctgccttccatggtcacggtcacgccattgagcagaccgtttgcgccgcgcactagcagccgcagggtcttttcgccgctgtcgcgcacgctggaccagtccgggtagaccacaaagtccgacgcgctgagcccgccgatggtgtagccatcgccggaaagcttcaggttcacggtcttgtcctcggcactgacgatgctcagaccccgggaagtataggcggcggaatcgtaggtgtaatccaccggcacattatagatggtgttggtggtgccgggctgaacgatgatggtgaccaccatccatgcaacgatggcacccagcacagacagtgccagccggacgcggcggtcatccagaagatttttctttttgcggacggcaggctttgcgccattcgtcttgttcggctggttgctcattgctgctcgtcctcccccttctggctgatccagttccacagctttttcgcctgctccacccagctgtcggcggtgttcttttccaccgtggactccttggggatcatctcgtcgatgaggcgggtatacaggctctggcggtcaaaatgacggatcagcacaccatttttggccatggagatgatgccggtctcctcgctgaccacgatggcaatggcgtcggagttttccgcaataccaagacaggcgcggtggcgggtgcccatatctttgcccagatccagattgttggaaaggggcagcacgcagcccgccgccttgatgcggccgttttcgatgatagcggcaccgtcatgcagaggtgtgccctcgtagaagatagtgcccagcacttccagattgaccgcgctgttcaccggggtgccggtgcgcacgatctcggaaaggttggtgtggcgctccagcacgataagggcgccggtcttggtctcagaaaagcgctcggctgcatcgcagatggcaatgatggcgctgcgccacgcacccttgagactggggtcgttgtagcgcccctttacgttgaacagcttggaagcccattggtcggtctgacccatgcgctccagtgcgcggcggatctccggctggaacagcaccacaagggtgagcagaccaacttgcagcagcgagttgagcagccatgtaacggtgcgcatattcagggtgttggctaccagatacacgaccatgaccagcagcgcacccttggccagctgcccggcgcgggtgcgattgatgatgcccagcagctggtagatcaggaacgcgatgatgatgatatccagcagatcaacgattttgaaggtctgaaaatttgcgatgatcgcattcagtgtcatgcgtgtgtgcccccttacacagcttcgatcagggcgacagcgtgggcagcaatgcccagtccctcgccggtaaagcccagatgctcctccgtggtggcctttacacttaccgcctctaccggcaggccaaaagcaaccgccagattggcacgcatggccgggatatggggtgcaagcttggggcgctggcacagcagggtggcgtcaatgttcttaatgcgccagccatgctccttgaggatctgcgccacgcggcaggccagcttcaggctgtcggcaccggcatactccgggtcattgtccgggaaatgctggccgatatcccccagcgccgctgcacccagcacggcatccatcaccgcatgggtcagcacatctgcatccgaatgccccagcaggcctttttcaaaggggatctccaccccgccaaggatcagcttgcgctgctctaccaaacgatgtacatcatagccgtgtccaatacgcatttccgtttccttcctctgtgccgggcggggcagatcctcccgggtggtgattttcaggtttgcatagtcgccctgcgtcagctgcaccgggcgtccggtcagctcaaacaggctgcaatcatcggtaacaaggcgggcgcgggtctcgtccagttcttccagcgccgcaaggtacgctgcacggtcaaaacactggggggtctgcaccgcatacagggtgctgcggtccggggtggcgcataccgcgcagtccgggggcacggttttgccatcgccccgggcggcggccttgatggtatccttcaccggcaccgccggggctgctgcgccgcaccgggcggcagcttccagcgccgccgtaatgaccgacgcactcacaaaggggcgggcggcatcgtgcaccgccaccagttctccgtgcgctgccagcacgccgttttttgcgctctcggcgcgggtagccccgcccgctacgatctgcacaggctttgggcagtccgccgcctgctgcgccacaaactcccggtttttgcctgccaccagcacaagctcggtgatctgcggacactgggcaaaggcgcgaatactgcggtgcagcaccgtttcgcctcccagatcaaagctgagcttatcaaaacccatgcgggtcgaggagcccgccgccaccaatactgccgatacagttttttccatctcttccacctaccctgccgctgtgccgcgctgcacgcccacagctgcttataataaaccatgttctattatagcgtatcacagcgcaaacttcaaccgattttacacagcaaaagtgcatccttgctgcataaagccctgcggcctgtcctgaaagggcagtcacccagagtgtgcgctttcgccccctcaggcgctgaccccttccgtctgctcaccacgttcgcagccaccttccccaaggggacggcttttcgcggtggcggtaaactttgcggcacctccataaggcttttgctccggtcaactgtctgctgaacgcaaaaaagggctgctgcacaaaaacgtgcagcagccccgcagatgctttgggatagttttacttcaggataggctcaatggcggcagccagagcatccttctgtgcctgcgcctcggccagatccttgcccagcgtggtgaagtaggtcttgatcttcggctcagtgccggagggacgcaccaccacggtagcgccgttttccagcgtgtagatcagcacgttggcagcgggcaagccggtctcttccggcttcttgtagtcggtcaccttgaccaccttatggccagccagctccacggggggctggtcacgcagcttctgcatgatggaggccatcttctccatgccggtcaggccggggaactcgaagctgtccaccttgttcaggtagcggccgtactgggcgtagatctcttccagacgctgcttgatggaggaaccgatgctgcggtagtaagcagccatctcgcagatgagcatggagccgatgacagcgtccttatcgcggacgtaggggccagccagatagccgtagctctcctcaaagccgaagatgaagcggtcgacctcaccggcagcctcgaggttggcgatctggtcaccgatccacttgaagccggtcagcacattgcgcatctccacgccgtaatgctttgccacagcgtctgccagcggggtggacacgatggacttgactgccacggggttcttgggcatggtacccttctcgatacggcctgcgcagatgtaatccagcagcagaacgcccatctcgttaccggacaccagctcatagctgccgtccgggcacttcatggcaatgcccacgcggtcggcgtcggggtcggtagccagcatcaggtctgcaccggtcttggtggccagttccagacccagcttcaaagcctcgaagatctcggggttggggtaggagcaggtggtgaagtagccgttggggtactcctgctcgggcacaatggtgatatcggtgatgcccatatcattgagcacatgggtcacgggcacaaggccggagccgttcagcgggctgtacaccagcttcagaccggcagtcttgcacagacccgggcgtacctgacgtgcttcaatggcatcgtacagagcctttttgcagtcatcgcccacaaagcggatcatgccgttctccacgccctcggcaaaggagatgtactttgcaccggtgagcacatcggtcttctggatctcatcatagacgatggcggcggcgtcatcggtcatctggcagccgtccgggccgtaggccttgtagccgttgtacttggcagggttgtgggaagcggtgaccatgataccggcgttgcagttatagtaacgggtagcaaagctcagggcaggcacaggcatcagggcatcatagatgcgcaccttgataccgttggctgccagaacgccagcggcggtcttggcaaagacatcgctcttcaggcggctgtcgtagctgatcgccacggtctgggtaccgccctgggtcagcacccagtttgccagaccctgcgttgcctgacggacaacgtagatgttcatgcggttggtgccggcacccagcacgccgcgcagacctgcggtgccaaacttcagcgccacagcaaagcgatctttgatctcatcgtcattgccttcgacctttgccagctccggcttcaggtctgcatcctccagatccgctgccagccagcgcttatattcatccagatacatcttgtacaccttacctttgtttaaaatctttttccccggatcgaaatggtttgtataaacctacttatactataaactcttgctccgcttatgtcaattgcgtaaaatggccgaagtttgtgcccttaaaaccgacaaatgccacaaaaaaccggttcttctgctatatttattgcgtttttcgaagtatccagcagctggtagggctggtgtacatcctccagcacctccagccactgctccggccccacgccgttttcacacaggtagcgcagcagccgcatcacccggccaaagctgtccgccggggcaagcaccgtgctgctgcgcaccttgccgccctgctcccggcgcagctgtgccagcaccccctgcggggtggatgcggcgcagtacaccagcgtacaggcgtgttgcaagccctccagttctgaataggtacggatatagcggcaacattccccatttgtcatgttctctcgttctcctttctgctgcattgacaactttcctgtgctttactataatgattttaaacagaaaaaactgtcgaagtatggcaaatatatccattattttccacttttggcatttttgacaaatcatgcgccatgcagggagggacaccatgtattctgtgaccaacagctttggcctgaacgggctgcgcggctttgccgttgcggtggaagccgatgtttccggcgggctgcccgcgttttccatcgtcggcctgccggactctgccgtgcgggaaagcgccgaccgggtgcgcgccgccatcaaaaaccttggcttccgcttcccggaccggcgcatcaccatcaaccttgcccccgccgatgtgcgcaaaaccggcccggtatacgacctgccgctgcttctggcgctgctgaccgccagcggacagttagaagaagtacctgccgatgctgcctttctgggcgagcttgcactggacggcagtctgcgcccggtgtccggcgtgctgcccatggcgcttgccgctgccgagcacggcatccgggcgctgtacgtcccgacagagaacgccgccgaggcagccgaggcctgtgccgacaccatgaccgtctatcccgcccacaccgcccgggaggtggtggaggcgctgaagggcatccgccccctctcccctgccgccgccatcccctttgacccggaggacgcatggcagcaggtgccggattttgcggacgtgatggggcaatcgctggcgcggcgcgccatggtcattgcagccgcaggcgggcacaacgtgcttttgaccggcgcacccggcaccggcaaatccatgctggcaaagcgcctgccgggcatcctgccgcccctgacccgggaggaggcggtggagacgaccaagatctactccattgccgggcagctgccgcagggacgcgggctgatctctgcccgccccttccgcagcccgcaccactcggccagcgctgccgcccttgccggcggcggagcgcagttccgcccgggcgagtgcagtcttgccaactgcggcgtgctgtttttggacgagctgccggagttttcccgcgagagcttagaggtgctgcgccagccgctggaggacggtcagatcaccgtgagccgcgccgccggcagtgccacctaccccagccacttccagctggtagccgccatgaacccctgcaaatgcggctactacggccaccccacccgcgcctgcacctgctcgcccagtgcggtgcggcagtaccgcagccgggtgtccggcccgcttttggaccgcatcgacctgtgcgtggagatggaccccatcgcctttgacgagctgcacaccgccgcgccctccgagagcagcgcggagctgcgcaagcaggtgctggctgcccgcgccattcaggccaaacgctacgctgcgccgggctttaagggagtgcactgcaacgcccagctgaacgccggacaggtgcggcgcatctgccgcatgacccccggtgccgagcagctgctgcgcagttcctacgatgcactgggactttctgcccgggcgcatgaccgcattttgcgggtagcccgcactgtggccgaccttgcgggcaagaccctgctggacgaggactctctgctggaagcgctgcaataccgggcacaggagaaattggacggataaggcagtctgcactctaaaaatacaacggaaagaggatggaacacatgaagcgcgcatacacaaacggtattcttctggacggtaccgagcagatggaaccggtacagggcaaggtgctgctgaccgaaaacgataagatcaccgccattgcagatgcgagtgtaagccttgacggctacgaggtcatcgacctgcacggtgggtatctgtgcccggggctcatcaacctgcacgtccatctggcaggcaacggcaaacccagcgcaaagccccgggacaatgcagcgctggtacgcaagatcctgagcaacaggctaacccgcgccatcgcataccggctggtgtgcagttatgccaagctggaactgctgggcggcgtgaccaccgtgcgcaccgtgggcggcattgcggactttgacacccgctgccgggacgacagcgccgccggaaaggtgctggcaccccgcattctggccgccaacgaaggcatctcggtgccgggcgggcacatggcaggctcggtagcagtagcggcacacaacaacgccgaggcgctggcgcagctgaaaaaggccagcgcacagaaggtagaccttgtcaagctgatgatcaccggcggcgtgctggacgccaccgaaaagggcacccccggcgagatgaagatgccgccggagatgatcaaagccgtctgcgatgcagcccacgcgctgggctataccgtagccgcccataccgaatcccctgcgggcgtgaaggctgcgctggaaaacggcgtggactccattgagcacggcgcaaaaatggacgaggagacggttcgtctgtacaaggagcggggcgcatttctgtgcacgaccatctcccccgcactgccctacgcactgtttgacactaccgtttcgggcgcatcggaaaaagaccagtataacggaaagatcgtctttgacggcgtgattgaaagcgccaagaccgcgctggcaaacggcatcccggtgggcttgggcaacgatgtaggctgcccctacatcacccagtatgatttctggcgggagttgtgctacttccacaaatactgcggtgtgagcaaccgttttgccctctacacggccaccctgcgcaacgcgcagctggcgggcatcggcgatgtgaccggctctatcgcgcccggcaaaagcgcagactttatcgtaacgcgcgaaaacccgctggcggatctgcgggctttgcaacatctggaactagtggtctgccgcggccgtgccgtgaaaaagccctcccctaagcgcaaaaaagaagtggacgccctgctggatccgtatctcgtgtaagcaacctgtccaacatataaaaacgcgagtggccaaaacggtcgctcgcgtttttgtttgctatcagtggttgcattttctcttttccggtgccgcccggtgtggtatactggaaacgtagaggcaaaaatggaaaggagcaaagtacaaatgaacattcgtaaagccgaagaaaaagacatccccagactgcttgcgctgctggggcaggtgctgcaaattcatgcagagatacgcccggatatttttatccccggcaccacaaaatacactgtctgcgagttagcagagcttttgaagcaggaggacaagcccatctacgttgccgtgaacgaggaggatgtgtgcatgggctatgccttctgtcagctgaagaagcagcctttttccaccaatatggtgcccttcaagtcactgttcattgatgacctttgcgttgataagcaggcgcgcggacagcacatcggggaaagcctgtttgaatatgtaaagcagcaggcaaaagcgctgggttgctacgaggtgaccctgaacgtctgggcggggaacacttcggcagagcacttttatgaaaaaatgggcatgaaaaccaaggaacggcagatggagtatattctgtaactcggcttcctggtttcaggacaaataatgcattctatatcccccggcgggcagctacaaaacggctgcccgcttttttatcgcaacataaaatcgcccgcattgtggtcaaagccaaaggaa

SEQ ID NO: 13828 - DNA, 4468 bp, Unknown
  gut microbiota DNA sequence
actgacaccatactctttcttgaatactcggctaaaatagagtgggttatcataccctacgatctctgcaatttctccaatattgtattcggtgttctccaataagctttgtgcatttaccatccgaagggacaggatgtattgtgcagggcttattttcatgtactgcttaaaattacggataaaccagttcgtactgatatgcagcgattctgcgtaatcgtccacactgacctttgtattataattctcgttaaagtaggcagcggcggcttcgatttcttcggggatgcttgtagttgttttctcgctttcctgctgttgcctgcttactaaaagcagaatgatgttgaagagagaagcaatatagtcttcatagccatattcacattgttgcagttcccggatgatctttcggaacagcattttgtagtccggcagtgtgccgctgtaaaaaacgtgcttgtccaagggtattccgtgatagttcaggatgtttttgacatcatatcctgtaaagtgaatccagaacacctctggatgatcttctacatagtagacatacttctggatttcttgcggctgataaagcaccatgtgtccagaagtcaccacttcctcaacaccatcgaaccagaagtgtgctttaccagatgccacatagaggatttgatagtctctgcgaccctttgcccaaaaagtaggcagcttagggcgttttttcaagcgataagtgccacaactgcctacgaccagcggctttgagtagtctttgaaatccaaacgggagttgttcaaatatcctgagttgaaatacatccctgcgtcctcctcatcttcagagattttacagtgatttgagaaatgttctatcaaaaaattacaaactctttgattttgtgcatattttgttccatcttgtctatatcttttcgttccattagattctataatattttcagacgaaacgcaagagatttgggtaacttgcgtaatgagaattccagtctgaagtgcgcagcagattggtcacgcccacacaaaacaagcaagatgggagaaagcacaatgactgaaaaacgttatctaaagtggtataataaagtcggctatggttcaggcgatattgcaggcaacgtggtgtatgcattcctgtcctccttcgtcatgatctatctgaccaacaccgttggcctgaaccccggtattgtcggcactctgattgcagtttccaaactgctagacggtgtgacggacattttctttggttctttgattgacaaaacgcattctaagatgggcaaagcccgtccttggatgctgtacggctacattggctgtgccattacgctggtggcaattttcgccatcccgaccaatctgggacagtttgcacagtacgcatggttcctgatcgcatatactctgctgaacgctgtattctacactgccaacaacattgcttactctgcactgactgctctcatcacgaagaacagtgccgaacaggtcgagatgggttcttggcgtttcatgttcgcctttgccaccagcctgctcatccagtccatcacgctgggtgctgttacggcattgggcggtggtgctgccggttggcgcactgttgcaatcatctacgccatcatcggtctgcttgtcaacaccctctccgttttctccgtgaaggaactgccggaaggcgaattggtggataccaccgacaaaaaggaaatcgagcaggacgaaaagtacaatctggttcaggccgcaaagctgcttgctggtaacaaatattatatgatgatttgcgtcacctacattttgcagcagatctacggtgccatgatcagcatgggcacctactatgcaacctacatccttggcaaccagaatctgttcggtgtattctcttgggcaatcaacattcctctgatcatcgcactggtgttcaccccgaccttggttgcaaagtggaatggaatgtataagctgaatgtaatgagttatactctggcaacgatttctcgtgcactggttgctgtagccggttacatgggcagcggcaatgtggccttgatgctgctctttactgcaatcgcagctcttggtcagggtccttggcaaggcgatatgaacgctgcgattgctgcttgctctgaatatacttggctgacgaagcataagcgcgtggatggcacgatgtactcctgcacttctctcggtgtgaagctgggcggcggtctaggtactgccatcaccggctggctgctggcagcaagccatttcgatagtgcgctggctgtccagcccgaatcctgcatctcgatgctgaagatcatgtatctggtgattccgtttgctctggatgccatcatcaccttcattctctctcgtatgaaggtcgaagaagcaaatgaaaaactgcgtgcagcagtctgataacaagccattatcatttctccttcatctgctgttccccggaggaatccagcgattcctccggggaggctggagaaacattataaaattataaaaggtaaatgaggaaatactatggctgcatttgattttgcaaaagtaaaagaccccacctttttcaaggaaaacgtgctgaatgctcatgcaagtttccgtacttacgcttcccgcgaagaatatcggacaggctcctcttctttggcgctgaagctggacggtatctggaaattcgcctacgcaaagaactacaccagtgccatccccggctttgaaaagacagattacggttgcagcggctgggatgacattcatgttccggcacacatccagatggagggctacgacattccccagtacgcgaatgttcagtatccgtgggatggccgtgaagaagtacagccgggcgagatcccgcagcggttcaatccggtggcaagctatgtaaaatactttgagctgccggaatccatgcagggcaagcccgtccacatcgagttcgagggtgtggaaagcggcatggctctttggctgaacgggtcttatgtgggttacaccgaggacagcttctccgcacacgcattcgatctgactccctatctccagccgggcgtgaacaaacttgctgtgcaggtgttcaagtggacttcctccagctggtgcgaagatcaggacttcttccgcttctccggcatcttccgcagcgtgtggctgtacgccatccccaccgtgcatctggaagatgtatccgtcaaaacgctgtttgccggggatgattttactcattccacgctggaagttgcattgcaggtggagggtaagggcgcagcccgtctgaccctgcgccgcagtgaactggaagtgttctccgaaaaaatcgcactgaacggcggctctgctctgttcagccatgcggtggagaacccccacctgtggagtgcagaggacccggctctgtatgaactggaaattgagctgctggacgacgcaggccatctggtagaggtgaccgggcagaaagtcggtttccgcaagttcgagttgaagaacaatcggatgctgctcaacggcaagcgcatcgtgttcaagggtgccaaccgtcatgagttcagctccattacgggtcgtgcagtgggcgtacacacccatgaggaactgcttcgggatatcatcaccatgaagcagaacaacatcaatgccatccgtaccagccattaccagaatcaggatgcactgtacgacctgtgcgacgagtatggtctgtatctgattgcagagaacaatctggaatcccatggcacatgggatattcatcaggcgggcattcgcggcatcgagggcgttttgcccaatgataagccggagtggaaagctgtcttgtttgaccgcatgaattccacttaccagcgtgacaaaaatcaccctgctgttctgatctggtctctgggcaacgaatcgtttggcggcgagactctgctccagatggccgagatggtccgccgctttgatgacacccgtctggtgcattacgaaggtgtggtcaatgatccccgcttcctcgaaaccaccgatatcgagagccatatgtacagcacggtcaaggacattaaagagtatctggcacagggcgataagcggccttatatcgagtgcgagtattctcatgctatgggcaactccaacggtgctttatacaagtacacggaacttgccgaccagaaggactgcggctatcagggcggcttcatctgggattacatcgaccagtccatctggaaaaaagaccgctacggcaagtggttccaagcctacggcggcgacttcggtgagcgtcctaccgactataatttcagcggaaacggcattgcctacggtggtgatcgtgctccttctcccaagatgcaggaggtcaagttctgctatcagaacatcgccgtttccatcgacaactctggctttgaagtctggaacaagaacctgttcacctctacgg

SEQ ID NO: 13829 - DNA, 15056 bp, Unknown
  gut microbiota DNA sequence
cgggtgccgtttcctttgtttttaccctgcgtctgcggtggactctaccaccacatacacccctgcgggtacacaggcggcccatgcgccgtccttgtccagccagccgaattgctcacagacatgatccgggcactgactgtccaaaaacgcgatggcaccatccttcacctgcaggtgcacgatgtagtcccctacctcgtacaggtaatcgtgatcctgcgcaagggtcaaagtctcggtaacgccgtcaccgaaatccacaacggcctgtaagccgctgcccttggcggggtgctgcgcccgcaccgcaagaaaaacacctgcggccagcgccagcaccaccagtgcaaagatcacatttttcttccacgcgctgcccttgggggcggcggtgtcagagtttttttgctttatgctcatgcagcgtacttgctggcagctgcaccggcaatgcggccaaagacggtaaagtcggccacagcgttgccgcccagacggtttgcaccgtgcacgccgccggtcacctcacctgctgcgaacaggccggggatcacagagccgtcagccttcagcacctcggtgttggtgttgatcttcaggccgcccatggtgtggtgcacacctgcggtgaccttgatagcatagtagggagcggtatccagagcctttgcaaagctggtacggccaaagtcggggtcgttcttggcctcaacgtagccgttccaggtcttcatggtctcggcaaaagcagcctcgtccacgcccatagcctttgccagttcctcgtaggtctggccggtcacggtgtagcccttcttgatgtagccctgaatgacgctggaggcatcgaccatagcctgatccaccaccagccagctgtagctgccggtctgagcgatctcggcagcggaaaccacgtcacgggtgcccacttcatcgatgaagcgcttgccctcggcgttgatcagcacagcgccgtcgccgcgcagaccctcggtgatcagggcagcggtgttagcctccacggtggggtggatctggatctgatccatgtccacagtgtcagcgcccacagcggtagccatctcaatgccctgaccctgtgcgcccgcggcgttggtggtcataaagcccttcagctcgggcttgtacttggtgaccatgtccagatttgcgccgaagccgccggtggtcagcaccacagccttggcattcacggtgatggtctcgccggtggaaccggtagccttcacgcccacaacagcgccgtttgcatcggtcagcagctcggtagcagtggtgttcagcagggtctgcacgccggccttgtcgcagttctcctgcagcagggggatcatgtaagagcccacagaaagggtcttgccctcagcatccacggggcgatggatacgcttgacggatgcgccgccgaagctggaaacgctgtgcagggtgatgccgtgctcgtccagccagtcgatggcgtcagcgctgttggagcacagagtctccaccagagcggggtcgttgatgcccttgccgccgatcatggtgtccagctccatcagctccacagagtcgaagtagcccttggggtctgcctgataagcagcccactgctcggagacggtctttgccagagcggtgatggtagcgttgtcggcatacttttcagcagcggtcttcagggtcttttccacgcctgcggactcgccgaactcgttctcatcctgatacacggtcttgccggcgttcatgccgccggtagcgcgcacggagttgccgcccaccatgggctggctttccagaatgaccacgctcttgccctcggcagcagccgtgatggcagcagtcatacctgcaccgcctgcacccacgatggcaatgtctgcgtcaatggtggagtcctcggccttgttctcctcagccttgacctcggtcttgtagtcgtcagcgttcaggccggctgcgaccagagcggcagcagcagcttccttgatggcgtcagaggtgatggttgcggtggccacaccgtccacggcaatgctgccgctctcggcaatcgcgccgggcagctgctccagagccatggtgccgatgccgggggtctcatccttgccctcggcggtacagccggtgatcttgccgtcggtcaaagtcagagtgacggtaacatcgccgcccatgcccttggcagtaccggtgaactcgccggacacgcctgcggtggaggaggcaggcttgctgccgcagccgtagcccagcaggctgacgcttacaacagccgccatggccagcgcagccacgctcttgcggatctgattctttttcattgtttcatccttcttattttgggttgcttgtgttcggatatctatcagcaaaaaaggggagctgctcattcggaaagcagctccccctcgctgaaacttaggaaagacttaggcgttggcctgagctgcagcaacagcgcaggcaacggtagcgccgaccatggggttgttgcccatgccgatcagacccatcatctcaacgtgtgcgggcacagaagaggagcctgcgaactgagcatcgccgtgcacgcggcccagagagtcggtcaggccgtagcttgcggggcctgcagccacgttatcggggtgcagggtacggccggtgccgccgccggaagcgacggagaagtacttcttgccgttctcgatagcccacttcttgtaggtgccggcaaccagatgctggaagcggacggggttggtggagttaccggtgatggagcactgcacgtcctccttcttcatgatggcaacgccttccataacgtcgttagcgccgtagcacttaacggctgcgcgctcaccctcggagaaggggatctccttgaccacagtcagggtctgggtggggatatcgtactcggtctgcacataggtgaagccgttgatacgggaaatgatgtaagctgcgtccttgcccagaccgttcaggatgacgcgcaggggggtcttgcggaccttgtttgcagtgcgggcgatgccgatagcaccctcagcagcagcaaaggactcgtgacctgccaggaaagcgaagcaggtggtgtcctcgctcagcagacgagcgcccaggttgccgtggcccagaccgacctgacgctgctcagcaacagagccggggatggtgaaagcttccagaccctcaccgatagcagctgcacactcggcagcgtcggtcaggccgcgcttcacagcgatagcagtgcccagagtgtaagcccagacagcgttatcaaagcagatgggctgcacgccgcggacgatcttgtcgcagtcgatgcccttagcgaggagcatctcgttgcaagcgtccagagactccagaccgttagccttcaggcatgcctcgattttaggcatacggcgatccatagattcaaaagttgccattgagttgttcctcctctcttattcctcacgcgggtcgatgtacttcacagcgccctgctccttgctgaagcggccgtaagtacccacgttcttctcgtaagcctcgttgggggtcttgccgtgacggatatcctccatcatcttgcccagcttaacgaactgatagccgatgacctcatcgttagcgtccactgccagcttgttgatgtagccctcggtcagctccagatagcgcacgcccttctccttggtggagaagatggtgccggtcatggagcgcagacccttgcccaggtcgtccagacctgcgccgatgggcagaccgtcctcagagaaagcggtctggctgcggccgtagacgatctgcaggaacagctcgcgcatagccacgttgatagcgtcgcacaccaggtcggtgttcagagcttccagaatggtcttgccgggcaggatctcgcctgccatagcagcagagtgggtcatgccggagcagccgatggtctccaccagagcctcttcgatgacgccgttcttgatgttcagggacagcttgcaggtgccctgctggggtgcacaccagcccacaccatgggtgtagccgctgatgtccttgatctcataggccttgacccatgcgccctcttcggggatgggagccggaccatgcttaggacctttggtgatcgggcacatattctgtacttgctgcgaataggtcataatcatactctccttttgacaaatgtcgctttggcagcataaaaccgccgccgcgccctgccggcacagctgctgttccatactgcttgcatccgaaccgggtgcgctgctctctttcagcgcctgcaccggtactaccacgcatgattttattatagagaaaacggacgaattttgcaagtcatttcctgcaaaaagtacagccgggttttacggtcatccggcgctaactggcatttccaccgctttacacaaatcagtcgtcaagtttttgtcaattctgccgtaagcaccggcaaacttttttgcacccttttctttttgcgcgtttcagcgcgggtctttctgcaccggatgcagcgcccagatggctgcaaaacccgccgccgcaccggccatagcaagcaggtgccgcccgttctccagcgccagcaagttggctgcaaaggggaacgcaagactgcccacgctctgccccagcgccagaaagccgtagttcacccccgcgtggggcaggccgaacaggtcggtggaaagggcaggcagcaccgcagccagcgccgagtagcagaaggtgagcccggcgtagcacaccaccacccaccagccccgcgccgcccagaacgccgccgacagcccgagcgaagccgcaaacagcccaaggtcggtggcgcggcggccgatgtggtcgctgagcatgggcatcagcatccgccctgcggcgctgcccacgctgcccagtacgatgctccacagcgcagcagtctcgtccagcccgcgctccatgcccagctttaagatgatggggctaaacagcagcaccgccggggtggaaaagcacaccgcgcccgcgcacagccagtactgctttgtgcgcagcatctgccccggggagaggtcgatggtgtttttgccgcttggctgctgttttttctgcggtgggtcgctgagtaccgcactgcccgcaaggcacaccggcaaagtgagcgcccccagcgcccagaacgcgccccggatgccctgcaccgggccaaagccccgcaacgccgcccggacgaacagggtaaggaacgcgccggaaagtcccactgcaccgccgatgaccccggtcgccagccccttgcgccccgcgtaccacttttgggcgcaggactggatagaggggtacaaaaaggctgtgcccagccccgccgggatgctgaaggccagaaagaacccccaccctgcccagcccggcagaaaggccgccgcaaaaaaaccgccgcagagcagggctgtgccccacaatgctgcgcagcgcgggccttttttatcctgtaaaaagccgcccagcacacaccccaccccaaaggaggcaataagcagggcaaaggcgtaacccgccccctgctccgaaaggccgtattcctccatgaccggctgctgaaaaacgccccacgccgccggtaagccggtaagcacctgaatggctgcccccgcagccagaatcgtccacgggtgttttgctgcaaactgctgtttcataccttcacctcaaagatttgtgcaatttgcgatagtgtgcccatttggattgacaatccggcattatcctttataatggtaaagtactgagttaaaaacgctcccgccccttttcaggcatcgagggcgggtacaatttacagatagagaggaattactattatgaaaacacaggctttgaagggtatgcgcgacctgctgcccgccgaacagaccctgcgcgattacattcagggcaagattctggagacctaccgctctgccggttttgagcgcatctccacccccatgctggaggatatggaaaatctggacaaatccgagggcggcgacaacctgaacctgatcttcaaggtgctcaagcgcggcgacaagctgaccgctgccctgaacaccggcgaccccaagcagctgtccgatatgggcctgcgctacgacctcaccctgccgctgagccgctactacgccgccaacaaggacaagctgcccaaccccttcaaggtgatccagaccgaccgggtgttccgcgccgagcgcccgcaaaagggccgtctgcgcgagtttgtgcagtgcgatatcgacattctgggcgatgcttcccccaacgccgaggtggagctgatcgatgtgaccacccgcgcactgctgaacatcggctttaccggcttcaccgtcaacatcaacgaccgccgcatcctgcgcgggatgctggagagcatgggctttgccgccgacacgctggattccgtctgcatcacctttgacaagatggacaagatcggtgccgagggcgtgaaggctgagctgaccgagaagcagctgccggagagcgccatccaagcactggcagactttattgccgccggggacgtgacgctggacgccgtagctgcccgctgcgccgaccccgccatcgccaacgacctgaagtatgttctggctaccgccaacacgctggctgccggccgctatcaggtggcctactgccccagtctggtgcgcggtcagggctactacaccggcatggtgttcgaggtgacctgcccgcagttcagcggtgctgtggccggcggcggccgctacgacaacatggtgggcaagttccttggcgtacaggtgcccgccgtgggcttctccatcggctttgagcgggtgtgcggcattctgctggagcagggctaccagatccccggtgcaaagcagaagatcgccctgctgtacggcaaggacaccgacttccctgccgtgctgagcaaggccgctgcgctgcgcgagcagtacaacgtcaccgtgctgccgcagggcaaaaagctgggcaagcagctgggtcagctggaagccgcaggcttcgcgggtgccgcctttatggacaaggacgaggtaaagatctttgcccagcagtaacccgcccgcctgacgattttagagttttgtgggtcagaaacgtctgcggacgtttctgacccacttttttcagccgtcacgacactaaaaaagcagccctgccggtgctccggcggggctgcttttgcgtaacagtgtattttttagaactcgatcttgctctcgatgtagctcttcagctcgctgatgggcatacgcacctgctccatggtgtcgcggtcacggacggtgacgcagttgtcggcagcaatgcccttggcctcgtcgcccacagtgtcaaagtccacagtgatgcagaacggggtgccgatctcgtcctcacggcggtaacgcttgccgatggaaccggtatcgtcgtagtccaccatgaagtacttgctcagctcgttgcggatctccatggccttctcgcccagcttcttgctcaggggcagcacggcgcacttgtagggagccagagcaggatgcagacgcagcacggtgcggacatcctccttgcccttgctgtcggtcaggtgctcctcgtcgtaggcctcgcacaggaaggccagcgccacgcggtcgcagcccagagagggctcgatgacgtaggggatgtagtgctcgttggtctcgctgtcgaagtactccagactcttgccggaagcctcctgatggcgggtcaggtcgtagttggtacggtctgcaatgccccacagctcgccccagtcggtgaacgggaaggcatactcgatatcagtggtagcacggctgtagaaggccagctctgcaggctcgtggtcacgcaggcgcaggtgctccttcttgatgccaaggctcagcagccagttctcgcagtagtccttccagtaagcgaaccagtccagatcggtgccgggcttgcagaagaactcgcactccatctgctcgaactcgcgggtgcggaaggtgaagttgcccggggtgatctcgttgcggaaggccttgcccacctgacacacaccgaagggcagcttgcggcgggtggtgcgctggatgttggcaaagttgacaaagatgccctgtgcggtctcgggacgcagatagcaggtggaagagctatcctcggtcacgccgatggcggtcttgaacatcaggttgaacttgcggatgggggtaaaatcgtgcttgccgcacacggggcagacgatatcctcgtgctctgcgatgaaagcatccatctcgtcaaagctcatggcatccacgttcacctcggggtgctcctccccgatcagcttgtcggcgcggtggcgtgccttgcaggcgcggcagtccagcagggggtccgagaagctggacacatggccggtggtcacccatgtctgggggttcatgatgatggcagcatccaaacccacgttataggggctttcctgcacaaactttttcagccatgcctttttgacgttgttcttgaactccacaccaagggggccgtagtcccagctgttggccagaccgccgtagatctcggaaccggggaacacataaccacggttcttgcagagattgacgatcatgtcaagggtcttttcgctctgttccattgtagtacatcctttccgtccgcggctggtttgccgtgtcgtatcgtgttgtgttccggcggctttccccaccgccgggcgtgcttgcggcttgcacaagcacagtatatttactgtaccatgttttgccccgcttgtaaagcccggcaaacagttcagccgcgctctgtcaggtattttaccagcaggcggtatagggcatccgggtcgatgggcttgggcaggtgctcattcatgccggattccagcgccttacggcgatcctctgtaaaggcgtttgccgtcatggcaaaaatggggatggtctttgcgtccgggcggtccatggcgcggatggcgcgggtagcctcgtggccgtcccgcaccggcatcatcacatccatcaggatggcgtcaaagccgcccaccggcgaggctgcaaaggcttccaccgcctgctgtccgtcggcggctttggtcacctttatgcccacctcgttcagcaaaaactccatgatctccatgttcagggcgttgtcttcggccagcagcacccgctgtccctgcagcacggcaaggtctgtctgctgctgctccggctctgcggcttcggtgctgtcgatgacaaagggcagggtgatggtgtaggtggtgcccacgccctgccggctttccaccccgatggtgccgcccattttatccacaaggcttttggtaatggacattccaaggccggtgccgccgtataccgagcgtgccccggcattctcctgcgtgaagggttcgaacatccgcttctggaactcttcgctcatgccgatgccggtgtccgcgcagacaaagcagatctgcaccttgtccccggtgcagctcaactcaaagcagtccagcatcacacgacccttgtcccggttatacttgatggcgttgctgagcacattcatcagcagccgcttgacgtgcagcgggctgcccaccagccggggatgcggcagcctgccgtattcccggtgcagcacaataccgcgctcttccgcctgtttttccagcacgtccgtgatctcgtgcatcagctcgggcagatcaaagggcacattttccagcaccacctcgccggactccagcttgcccatatccagcacctcgttcaccagctccagcagcagggtggaggcctcccagatctttttgcggcagtcggcctgccgtgccatatcctccgggcagcggtcgccgatctccaccataccccggatgccgttgatgggggtgcggatatcgtggctcatgcgctgcaaaaactcggtcttggcaaggtttgcgctctccgccttcagcgcagccgccttgagggtcttttggtactcctgctcccggcgcagctgctgctcccggtagcgccgggcggtcttgccacgcagcaattgcaaaaggaacagcacgaccatgtaagcaaaggccgccatgctcacattgcgcatggtagagacagacacctcctgctccgggcggtagacatagatataaaagctgcgtccctgccccacaataccgtaggcgtactgctgcccggtggtgctgtgcacatggatcatgccgccgtctgtgctgcgcgcttttaaggcagaaagggtggggttttcgtccacggtggtatccagcaaagaggtatcgttgctggccacgatgcggtcaccccgggtcaccacgatggttccgtccacagcggggttatagccctgcacgcagttctggtaggaaagactgtaattgcgcacatattctgccgtggtgcggtagtacaccacaagcaccccgttcccatctttccgggcgcaggctgcggtgtccacataggagctgtcctccttttccgtccgtccggcatagacctgctgggggtggtcggccaccttcagcacgatagaaccggccagttccttttccatctgttcccggacctgcgggtcagccacccggccatcctgtgaggcaccgcacaaaattttgccctctgccgaaagcacaaggatgccgctgagggtataatcctgcaaatattcttccatagcggcatcgtccagcacccgcccggggttctcctgctggtcccgggcgatctcgctgcacagatgctgcgcgttttccatcacccgcatcaggcttttggcctcggtggcaaggttcaggttatcgtagctggtgcactgctccttaacatagctgacggtatcctcaaactgcttttctgcattttgcaggtcgctgtgggccgaaagccccagcacaccgcccagtatcagcaacccagcaagcgcacagatcagaatgtgctgcttccggctgataaccagtgaccctttttccattccgtcatgcatgggcgctgtcctccagtccatccagatagtgcccggggtcgtccagatagcggctcacgatctgccggacggtgccatctgccagcatctcccgaaaaacctccgtcagctgctgcggcaggtcatcgccgcgctctttggcaaaggcaacgcccagccgcgccgtcatcagcggctcgtccagaatgcggtattcaacgctgtaatctttcatgaactgccggatggcgctttcgtgggcggctaaggcgtccgcgtagcctttgagcagggtggtgtagagcagatcccgattctgcagggaatacagcctgcgcagccggggcagaccgttctgctccgcattcaaaaacagttcctccggctttgtggtggactgcaccgccaccaccttaccggccagatcctgcagggtgcggatgtcgctatcggagcgcactgccaccacctgacggctgtacagatacggccctgcccattggtattcttcctcgcggccatccatggaaaagctgccccagatgcagtcgatggtgtcgttttccaccagttccttcttcttttcccagtcgatggtcacaaatttcacccggtagcccaaccgcccgaacgcctcagtggccagttccacgtcaatgccggtgggcgcgccgtctgtgcccatatagttgaagggcgggtagttatcgctgcccaccacgatgaccggcatcgctgccgtatagctgtcggcttttccgggatgcaggcagctgcaaagcagcaccgcacatgttgccagtgccagcaggcaggccgccagccgcagtcctcttctgtattttttcatggttcttccatcctgtattttttgctgtattttgcagcagatcgctccatgttatcagtataataaaatctgttccaaaagaaaagccaaaaatcacttttccggcagtttttacgcttttctgtaaaaagagctcccggagcgttcgcagacgttccgggagccaaaataaaactttttacttgtggtacttcatgcccgcattgatagtgcaggcgcggtagatctgctcggtgagcaccagccgtgccagctgatggggcatggtgatgcggcccatactgaacttgagggcagcggcctttttcacctcatcggacaggccgtgggacgagccgatgacaaaggccacatcccctgccccgctgccggcgcgctgtgccagaaactgcgccagttcatcggaggagatctgcttgccctcgatgcacatggctacaatagcagcccccttgcgcacattggaaaggatggcttttccctccttatccagtgcctttttcaccacggcgtccgaggcgtttttctcctcgatcttttcctccggcagctcaaggatgcggaaggcggcaaaggccgccagacgcttctggtactctgccacaccctcggcgaaatatttggcgttcagcttacccacacagatcaggtcgatattttgcatgactgcttcctcttttcaggataaacgatttaaaattgtctccgcttcgctctgacaataacagcggaaaattttttataatttgtaactccgaaacgactgcggtcgtttcggagttactttttcacgggaggggacttttcggagcggcggcggggagtttcctgagcaaattccggcgaagtggggccccggtgcgcagcactggggcggaacagggggttccggactcatttgcgaaggaaagttctccgccgcctgccatcacagcaggctcatctgctcgccctcgtcctcggcgcggatcagcgcaccggtggcgggcaggctgcgcacacggtagcggtgggggttggccagctccaaggtatcagccggcaccaccgaggcaatggtctggttctttttcagggtgaccaccgccacgccctgactgtcgcgggtggtcttggcggcgatctgcgccgtacccaccagcagcatccggctggcactggtgcggatggcaagctcggtctcctccggcaggtagagcatcatggcaagcggttccttatcgctgtacgccttcagcagcttgcggcggttctgcttggtggcgtaggagctgagggggatctttgcgcacttgccgctggcaaagaagaacagcataaagccgctgtaatcgccggtaatgaccatgctcagcacgttttcgccctcgtccatgcccagccgtcccgggatgaagatgcccatctgggccaccttgccgtcctccagttctgccagacgtgccttgtacacctgctgcttgtcggtaaagaacagcgcctccacgttgttgcgggtctccagctgctggatgatctcgtccccctccttcagcttgtgggcaccggcagtgcgcaggctctggggcgggatctttttaaagtagccctcccgggtaaagaacacggtcaccgggtagtccggcacagcttcttcctcagcggcagcatcctcttccggcaggtcgtacaaaatctcactgcaacggggcttgccgtattttttcgctacatcgttcagttcgttgatgatgatgcggcggatgcgggcgggctttgccagcacatcgttcaggtcggcaatgtccttttccagctgctcgatctcgccggtgcgcttgaggatgtattcccggttcaggtggcgcagcttgatctctgccacatagtcggcctgcacctcgtcaatgccaaagccgatcatcaggttgggcaccacctcggtctcctcctcagtagtgcggatgatacggatcgccttgtcgatatccagcaggatggcggcaaggccctgcaacaggtgcaggcgcttttccttgccgtgcaggtcgtagtaggtgcggcggcgcacacactcaacgcggaatgccgtccactcctttaaaatctcccgcacacccatgacccggggctgaccggacaccagaatgttgaagttgcagctgaagctgtcctccagcggggtagccttgaacagttttgccatcagcttgtcggcatccacgccgcgcttgaggtccagcgtcagcttcagaccgttcaggtcggtctcgtcgcgcatatcgctgatctccttgaccttgccggtcttgaccagctccgcgatcttatccatgatggcctccaccgtggtggtgggcgggatctgggtaacctcaatcatattttcgccgggcactgcattgtagcgggcgcgcacctttacgctgccgcggccgttctcgtaaatttcacgcatctgcgcttcatcatacacgatctggccgccgcccacaaagtccggggcgggcatggtggtgccgatatcgtggtgctcgtccttcatcagcgccacggtggtggcacacagctccgccagattgaaggagcagatgttgcaggccatgcccaccgcaatgcccagcgtgttgttggccagaatggtggggaaggtgaccggcaacagggtgggctcggtggtggtgctgtcgtagttgggcacaaagtccacagtctccttgtcgatatcccggaacagctcctcgcacacgctttccagctttgcctcggtgtaacgggcagcggcgcaggacatatcgcggctgtacgccttgccaaagttgcccttgctgtccacaaagggcaccagcaggctttcgttgccgcggcccatgcgcaccatggtgtcgtagatggcggcgtcgccgtggggattcaggtgcatggtgctgcccacgatgttggcagatttggtgcgtgcgcccttgagcagacccatctcgtacatggtgtacagcagcttgcggtgcgccggcttgaagccgtcgatctccggcagcgcgcggctgacgatgacgctcatggcgtagggcatatagttggtttccagcgtacgggtaatgggatcctccagcacgctgcctgcgtttaaaatttcaacgccgtcacccagctgcgggcgcaccggctttaaggttttcttggtcgatttttttgccattgtgtttcctcatactgtccagaggccgtgttt

SEQ ID NO: 13830 - DNA, 3208 bp, Unknown
  gut microbiota DNA sequence
tttgaacaactagaaacgctaaccgaacaaaaacggtgttttttgccctagttgttcatcttgaacaactaggaataaacgtagataagttaaaaagttctagttgttcaaaagtccatagtagtaatagagttttataagggtgttttgaacagtcacaggccttgccctcggcagggaacagtgcaaaacaaaaaatcccggaagccgaagcttccgggaatcttttggaggtgacgaccagatttgaactggtggatgagggttttgcagacccttgccttaccacttggccacgtcaccatataagggagtgatgaataccactccaatggagcggccgacgaggctcgaactcgctacctccaccttggcaaggtggcgctctaccagatgagctacggccgcatattcggtgcatttgtccctgcaccctcccgagcgattcttgcgaatttcggggcccccgcaaaagcttgcgaagcaaagttttgcggggaagaggaggaatttcagagtttgttacggcggtcttacttgtaagactgccagacaaacgactgacattccgacgaagcgacccggatcgggctcgaaccgacgacccccagcgtgacaggctggtgctctaaccaactgagctaccgggccataccggagcaactgttgctgctccttaatggagcggccgacgaggctcgaactcgctacctccaccttggcaaggtggcgctctaccagatgagctacggccgcatattgggaaaccctgttgggtttccttgacgtggtgcctccgatcggaatcgaaccaatgacacggggattttcagtcccctgctctaccgactgagctacagaggcgcaccggacgatgattattatacctgaaatttcgattttgtaaaggggtaaatgcaaacttttttgaaaaaattgaaaagtttttgctttttggcgtctctgcgtgcaaaataagaacgacttttttcgtggttttcgtgccggaggcagtacgggaaaagagagaaagaatatttgacaagttttacaacctatggtttaataaaagaaaagaacacaggcgcttatgcccgcagagatgctgttatatttcttatataatagaaagggcgggcgtctgctttgattacaggacggcctgcgcggcacagctgcgatgggccgggaggagcagcatggcaaaaaaacaggaatatggcaacgagagcattacctcgttaaagggtgccgaccgtgtgcgcaagcgcccggcagtcatctttggctcagacggtgtggagggctgtgcccactcgatctttgagatcgtgtccaactctatcgatgaagcccgcgacggccacggcgataccatcaacgtgacccgctgcaaggacggcagcgtcattgtggaggactttggccgcggtatgcccgtggactggaacaacggcgaggggcgcttcaactgggagctgctgttctgcgagatgtacgcgggcggcaagtacggcgaaggcgaggataactacgagttcagccttggcctgaacggtctgggtctgtgcgccacccagtacgcctcggcatggatgaccgccgatatctaccgcgacggttaccactaccatctggactttaaaaagggcgagaacgtgggcggcctgcaaaaggagccctacaagggacgccgcaccggcagtatcatccactggaaaccggacgatgaggtgtttaccgatatcgatgtgcccggcagctactataaggatgtgctgcgccgtcaggctgtggtcaacgccgggcttaccctcaactttaccgatgaaaaggaaaaagaccccgccaccggcaagccgtggcacgaaagctggtgctaccagaacggcatcgcggactatgtggcagaagtagcaggggaagacaccctgacccccgtgttcagctgcgagagcgaggctgtgggccgggaccgcgaggatcagccggactacaaggtgcgcatgagtgcggctttttgtttctctaataaggtacagctgctggaatactaccacaactcctcgtggctggagcacggcggcagcccggagcacgcagtgcgcaccgcctttgtctaccagatcaacaagtacctgaaggaaaagaacctgtacaaaaagggcgagagcaccatcagctttcaggacgtgcaggactgtctggtgtatgtgtcctccagcttttccacccgtaccagctacgagaatcagaccaaaaaggccatcaccaataaatttgtctcgcaggctatgaccgacttcctcaagcattatctggaagtgtattttctggaaaagccggaggaggcccagaagatctgccagcaggtgctggtgaacaagcagagccgcgagcacgcggaaaaaacgcgccagagcatcaaaaaaacgctctctacgcaaatcgacttagccaaccgcgtgcagaaattcgtggactgccgcacccgggattccgcccgccgcgagctgtatatcgtggagggcgactcggctatgggcgcggtcaagtccagccgggacagtgaatatcaagccatcatgcccatccgcggcaagatcctgaactgtctgaaggcggattatgcccgcatcttcaagtcggacgtcatcgtggacctcatcaaggtgatgggctgcggtgtggagctgggcggcaagcacaacaaggagctggctacctttaacctcgaaaacctgcggttcaataagatcgtcatctgtaccgatgccgacgtggacggctaccagatccgcacccttgtgctgaccatgctctaccggcttacccccaccctgatcaacaagggctatgtgtatatcgcggagtcgcccttgtacgagatcaccacgaaggatcgcacttatttcgcctataccgagccggaaaaggccgcttttctggaaaagatcggggacaaaaaatataccatccagcgctccaaaggcttgggcgagaacgaccccgagatgatgtggctgaccaccatgaacccggaaagccgccgcctgatcaaggtaatgcccaccgatgtggtgcagaccgcgcaggtgttcgatatcctgctgggcgacaatctggcaggccgcaaggagcatattgctcagcacggcgcagagtatctggatgatctggacgtgtcctgataaacagaacgataccg

SEQ ID NO: 13831 - DNA, 2308 bp, Unknown
  gut microbiota DNA sequence
gaccagcatcatctggtctccggcggcgttcacggtcaggtacagttccatgcggtcggtgcccgccatggcattggagtacagaccgttttccggcagcggctcgttcaggccgtgcaccttgacggtggcagcgtccttgtagtagtccgcaagggcggcagctacggcttcggcagtggtgcccgcaaggccaagatccagcggcaccagcacctgcatcccgcagtagtagtcgcacaccaccggcacgaacatcggcgtgtgcgcaaggccgctgatcttctgcatctccggcagatgcttgtggccaaggctcaggccgtagctcttgggcgcatccagcttgctgtgcgccgggcggtcggggctttcgtagtccgcgatcatctttttaccgccgccggagtagccggagatgccggtgcagctgaaggggtagtcctttgccaccagccccagctccaccagcgggcgggcaatgctgataaagccgctggcatagcagccgggcaccgccacgcggtaagagttctgaatttttgccttctgtcccttcagctccggaaatccgtagtcccatgcggcatcggtgcggaaggcggtggaggtgtccagcaccttcacgtccgggcgcagcaagggcatgacttctttagaagctgcatccggcaggcagaggaaggcaaggtcggcagaattgatgacctttgcccgctcctgcacatccttgcgcccttcggcggagatggacagcagctcgatctccggccgttcggccagacggtcggcgatgcgcaggccggtggtgccggaagagccatcaataaatacctttaccttcatgcgttttcctcctcccatgcgtccagccgtgccgttgccagcgcgatctggcgctggacgctggcggcgctgggcccgccgtagctggtgcgtccctcgcagcagtgcacaaggtcgatggcatcatagatatcggccccgaacagcgggctgtaggtctggaactgggtcaaagtcagctcttccagcgttttgtcggcggcaatgcagtccgacaccatgcagccggtcagcttgtaggcatcccggaagggcatccccttcttggtcaggtagtcggcgcagtcggtggcgttgataaagccctttgcggcggcgcggcgcatattggcgggcagggtcttcatggtatccagcatgggggtgatggtcttgagacagagttccaaggtatccactgcatcaaagatggcttccttgtcctcctgcatatccttgttgtaggccagcggcaggcccttcatcatcaccagcagggtgttcaggtcgccgtacaccctgccggtcttgccgcggatgagttcggtcacgtcggggttcttcttctggggcatgatggacgagccggtggtaaaggcatcgtccagctcgatgaacttgaactcccagctgcaccacaggataatctcctccgaaaggcgggacaggtgcatcatgcagatggagatggcgcttgccagctcgatgcagaaatcacggtcggacacgccgtccagactgttggcacagggggcggcaaagcccagcttttcggcggtgaaatcccggtccagcgggtaggtggtgcctgccagtgcgccagagcccagcgggcactggctgtccatgcgggcggtggcgtccgcaaagcggtcgaggtcgcgcagcagcatggaagcgtaggccatcagcgcgtggccgaaggtgatgggctgggcacgctgcaggtgggtatagccgggcatgacggcggcggtattctccgccgcctttttgcacagcacccgcaccagctccacgatgtaagcctgcagggtgtggctgtaatcccgcaaagtcaggcggatatccagcgccacctgatcgttgcggctgcggccggtgtgcagccgcttgcccgcatccccgatgcgggcggtcagggtctgctccacaaaggtgtgcacgtcctcggcggcggggtcgatggtcagcgcaccgctggacagatcgtccgcgatggaagccagaccgctgaggatgtccgcacagtcctgctccgagatgatgccctgccgtgccagcatggcggcatggacgccgctgccgcgcatatcctgcgcgatcatccgctggtcgaagcggatggaggagttgaagtcgttgacgcggctgtccaccgccttggaaaaccgacccttccagagttgttctgccataatacttatcctttactttatgtccgggaacagctgccctgcggcaagcatcctcgccctctccg

SEQ ID NO: 13832 - DNA, 598 bp, Unknown
  gut microbiota DNA sequence
tacacgccaagcaggctgtccagctgcaattttgccattttttcagccatggcgcagacctcggcgtccatggtcagcggggtggtattgccgttgttcttgcgcactgtgttcagtgcttccaccaccgcagccaccttctgcgcctcggtctttttgtcggtggggtctttgccggtctcgctgctgcccggcttatccggcgcatccggcgcggaagggccggagggcccgcaggctgctaaaagcagcagcgccattgcagctgcaagagccgctgccgtccatcgtttccaaagcttcatctgtggtcccccgctttcttcttatgggagcgcgttgctccacggtttcatcttatcccctgctgcggcgcgttgtcaatgggcagatgcgccaaactttgccggaaagtttcggcatagcgtgcaaaagcaggaacattttgaatgcgcgccgcgccttccgggttgcggcacccagcatccgcatcgtgccttgggcggcactcgcatcttgctggccgctgccccaacaactcctccctgtttccgccgctggcggcggtcgtcgtcgttgcactttgggcatcaatagc

SEQ ID NO: 13833 - DNA, 36720 bp, Unknown
  gut microbiota DNA sequence
cagccaagcaggaatttcatgtaggcaaaggtgcgctcccgcccgaggtcccgcaccatgcacagcagcttttccagcagtgcccgggtctccgggtgcatcaggtagtgatccttgctgcgctggtagtactcccacgcagaggcatcagtgtacttatcgcccagatagatctggcttgccgccacccggtcgcacaccatctcgcagacgtaccgcagggggatcttcatgccggtcaggccggtcttggtggtgctataatcgatccagtattccagatgatgcttgttgcgccccttgtggtgcagccacgccgaggtgtagcccttggctgcgcgctcggcctcgttggggctgtggtcaccctgataatagatgcacccggggatgaactcggtggggctatacttgctcaggtcgtgggcaagaccctgctcatacaacccgcattcaaagcagtatttcatcaccagcagcttgtgccgggtgatggtctcgaaatgacccttgatgttcatgctgttattccctccactgcaccgtgatgcggccctctttcagcccgcgcagatcatcgctttcggaaaaatcctcccggtccatggtcaggttggggttgtagtaggggtcatgcaggatgttctccttgccgtgcacctcgtacagacgctgctgctcggcggcaaagcgccgtgcctttaccgggtctttctcgtccccgccgcggctcttgctctcgtagtgggtcagctgggcgtagggcgtccacgcaatgcggtagcccgcatcccgcacccgcaggcagaagtccacatcgttgaaggccaccgcaaaggcttcgtccaacccctttacctcgtcccacacgctggtctttaccagcaggcaggcaccggtcacagcggaaaagtcctgcaccgtggcggtgcggaacagatacccgctgccgcctgcctttttgtacttgtggctgtgccccgcgtagccccccagcccggtaatgacgcccgcgtgctggatggtctcgtccgggtaaaagagcattgcaccgcacactgccgccccgccggggtgagcgcattggcgcagaagttcagtgagccattcgccgctgcgcacctccacgtcgttattcagcagcagcagatattcgccggtggcgtatttgcggccaaagttgttgatgccggaaaagttgaagccctttttcgggtaggtgaccacccgcaggccgtcgtagcgctgctgcgcctttttatagtaggcaaaggtggcggggtcggtggagttgttctccaccacgatcacctcaaagtgctcccattcagtctttgtccagatgctgtgcaggcacttttccagatcctcggtgtggtccttgttggggatgaggatgctcaccttcggctcgcccacgatgtcccacttcacccggtaggtgctggggaacaggccgtcctccaccgtgccggtgcgcccggtgcgggtcaggtggtctgccagcgcctttttggccgctgccgccacatagggctttgcgtctgcaccgccggaggtagaccccgcgtgcacccgccagtagtagagcacctgcggcacatgggcggcaccgccggtcttttccagcagacgcaggaacagatcatgatcctgactgccgtcgcattccgggcgttcgccgcccagctgctcccacagcgctttttggaacaccgccagatggcagatgtagttgcagcacagcaggtaatccggggcgtagtccggcttgaagtgcgccaccatggggcggcggatgcttttggtgaacagtgcctcgtcgctgtacagaaatccgtccggttcgccgcgctgccgcagctgcaggatggccttgcccatggtgtacagggcatggggtgccagaatgtcgtcgtggtcagccagcgccagatactcccctgttgccagctgcgcggcggcgttggtgttggccgcgatgcccttattttcgatctttttatatacgattcgttgattcttttgctgatattcctttacgatccgctccacgtccccgtgggcagcgtccgaagcatcggcaaggcagagctgtccgttgggcgcggtctgccccacaaaggaatccagaaattcccgcaggtatttttccggggtgttatacagcggggtcagcaccgaaatggtgggcagaccgcagtctgccgccgttttgcctgccatctctgcgcgctgggcttccagtacctttttggcgggcaggtagcgtgcacgcttgccgaagcagcggcgcttcacaaagcccgcgccgcgcctgaccatggtgggcaggccctcgtcctttgtcagctgcacggcgtagctggccagctccttggcgcgtttcaaccgtacattcatatatcagacctcgccgcgctgggtcgccttataggcggcgcagactgtctgggtgtccccgttcattttcaggtgaccgtggctcagccatgctaccttggtgcacatccgctcgatctgctcgatggagtgggacaccagaatgaccgtggtgccgcccgccatcagctcctgcatccgcttttcgcacttctgctggaacaggaaatcgcccaccgacagcacctcgtccgcaatgaggatatcgggcttggtgatggtggcaatggcaaagccgatgcgtgccaccatgccggaggagtagtttttcagcggcacatccagaaagttttccagctcgctgaattctacgatctcgtcaaatttttcgtccagatacttgggcgagaagcccagcaccgtgccgttgaggtagatattctcgcgggcggtcagatccatgtcaaagcccgcgcccagctcgatgagcggggcgatggtgccgttcacggtcaccttgcccttgctgggcttgtacaccccggcaatggtcttgagcagggtggatttgcccgagccgttcaagcccacaaggccgtaaaaatcgccgggcatgatgtccagactgacgtccttcagggcgtagaactcgtcgtattgcagccgcccttgtaccatggccagaaagtactccttcaggctctcatgcttttccttggaaaggttgaagcacatggaaacattgtccactttgatgatcggttccattgttcaccctccttaaatgtgcagcacaaagtgatcctgcgttttgcggaacacctgcagccccactaccatggacactacggcgcagatgccgcagacaaggaacatatttacgtccagcgggatgccccacatcaccgtgcggcggaagcccgtgatataccagtacatggggttcagcttgatgatctgctgcatattgaacccgccgatggaaaaggtcatctgagtggggtcgtagaagatggcagagaaatacagcagcgcggtgacgaacacgctccagatgtgcatgatatcccggaagaacacggtagccgccgctaagaacatactgaccccgaggctgaagaagaacaaggtcaccagcgggtacagcgcctcaaaaatggtcaggtggaaaggcgcgccggtaaagatcatgaccagcagcagcgccacaaagctgaagatgcagttcaccatggcaaagcagcacttttccagcgggaagatatacttggggatatacacctttttcagcagcggggcggcgctgagcacgctgctcatgctggtggaggtagcctcgttgaagaagttgaacagcagctgaccgcacatcagaaagacggcaaagttgtcgatgccgctgccccgcatatccatcaggctgctgaacaccgcccagtacacaaggcacatgagcagcgggttcaaaacgctccacaccacgcccagcacgctgcggcggtatttcagcttgaaatcacggcttacaaggttccacagcagatagcggtagcgccagaagccattccacattgctttgagttttgccacgggcgatcaccacttttcaaaatactcgaacttctgggcggcaaagggctcgtgcagcttgtcctttgcgctggtcttgtgctcacagccgcagtccggccactgcacgttgacggtggggtcatcgtaggggatgccgccctcgctggtggggtcgtagacatcggtgcacttatagcagaactctgccacatcgctcagcaccagaaaaccgtgggcaaagccctccgggatatagaacatcttcttgttgtcctcggaaagggtcacgcccacccacttgccaaaggtggcgctgtgggggcggcagtccacggccacatcgtacacctcgcccttggtcacgcgcaccagcttgccctgggtgtggttcttctggaagtgcagcccgcgcagcacgccccgggtggagcggctctggttgtcctgcacaaattccttgtcgataccggcctctgcgaactggtccttctggtaggtctccataaaatagccgcggtcgtcgccaaacacctgcggctcaatgaccaccacgccggggatctcggtctgcgtaaaaataaacttacccatgatattgtacctctctttttttctgaaagctttttctttatctggaaaagtctggttttgaacaggcttttacgcttttttatggtgccttgccgttttgcggcgctttttcaggcgggaatgtacccgcagcaccagtacggtaaccacggctgcacctatggtgcaccccaccgagatgcccgccagcagccatgcgctgctgcccggttccacgtccctggcggcttccagctttgtgccgacgctctgctccagcagttccgccagacctgtgatctccgcctttacccgcacgctggtgctctcctgctgcgcgccgccgttcagggtgtacaccgcatacacggcgggctctgcgccaagcagatactgctccggcagctccaggtccacggtcacatcctgcgcggataaaccctcggccagcagcagcttcaccccgggatcggctacggtaacggtgccaaggctctgcccgccgcccgccacagccagctgtgcggtgaccgtgccgccgggcagctgggtgtagcttttataggtggaaaaggcgtagtccagcagggtgcgcatatcgttatatttatcggtgctcagctggctttgcatggtcgcgcagatcagccgcaccccgtcctgctccgccagacagacatagctgtaccgggcggtgttggtatagcccagcttggagcccagcacactgtcgatatggtagcggctggagccgatgcgaatcttatcctgctgggagaagtagcgggtcaccggctggatgttggtgggctgcatggtgtacatctcgttgcgggtgaacaactcctcaaaccccggctgctgcagcgcccagcgcaaaatctgcgccatatcgtagcagctggtgtagtggtcctcatcgctgatgccgtgggggtttgaaaagtgggtgtgggcaaggccaagctcctccacctgtgcattcatggccgccacgccgtccgcgatggtgccgccgccgaaatactccgccagcaggttggcaccgtcgttggcgctggccatctgggtggcgtacagtgcatccaccaaggggacttcttccccctccagcagggcgatgtggctggaatccgtgcccgccagcgagtaaacgtcctcatggctcacggtcagctttacgccgtcccagtccccctgcgccttttcgcaggcaagaccaagggtcatcaccttggtaatggaggccgggtgcagctcctcgtccatattctgctgcgccagcacaaggccggtgtctgcatccatgatgcagtatgcccgggtattggccagcgccgggccggccgctgccgcgccgggcaccagcacagcgcctatcaaaagcagcacagtgcacagtgctgcggtaaattttttcatctggtattctccgcttatccgttttatgccgacaagacatcatttgaagtataccacattttttccccgctgaaaagagatttacgcattcctttgtcccagcagcaccggctgcagctgctcaccccgcaaagcggcgtccacggcggcgggcaacagggcaaggtcggccttcaggctctggggcttggcaaaggggtcgtcctgcccgtagggcacaaagtaatagtgcttgcgctggcacaaccgcgccatattttcgccggaggcgccaaggccgtcgttggtagagactgccagcaccaccgggctgcccacccgcagcaggcttttggcggcaagggtcaccggcgtatccgaaagtcccgccgccagccgcgccagcgttgcgccggtgcagggcgcgaccaccagcgcctgcgccagccgccgggggcccagcggctccaccgcctgcagggtgtccagcaccggctgcccggtaacggcctgtaagcgctgccgccagctttccccggtgccgaaccgggtatcctgctgcgcggcaaagctcatgacgggcagcagcgtccagccctgtgccgtcagcgcctgcgccgcgcccaaggcgtcctccaacgtgcaaaagctgccgcacaccgcaaaggcaagacagccctttttctctgtgatcatatcttctcctcccgctcctgcaaaatggcttgcaccgtgcgcgccagcgcctcccctgccgtttccggcgcccagaccgtcggcaggctcagcgcgtgcagcgccgtgtgccccagccgccgggcggcggcaaagtccgtgccgccgggctttgaggccagatccacgatcaggcaccccttcggcagcgccgccagcactgccgccgtcagcaccggcgcggggatggtgttcaccaccgtatcaaaggcggcagctgcggcggcaaggtctgtcagcggcaccgcccgcagaccctgctcctctgccatggcccgctgcaccgggcggcgtgccgccacggtcacccgcgcgcccagtgctgccagacgcaccgcaagcgcccgccccacagggccaaagcccagcaccagcaccgccgcgccccacagggtacggctgcgccgttccagcagaatgccgatgcagccctcggcggtggggatggcgttatacacggtcagctccgggcgggcaaagtagtccaccagttccacccccgccgcccgggcgacggtccttgcgctgtccgtcaccttaccgcccagcgccagtgccccgggctttgccatgcccagcagctgcgccagcggcagaccggactgttccagcgggagcggcagcaggatgcagtctgcctgcggcagctgctgcacgccacccaccggataccccgcccgcgccagtgcacgccctgccgccgcctgccgggcatcgctgcccaccaccgcaaaccgctttgtctgcctcatgtcgtcatctccccttttccgctgtgcactatcctatgcaggaagaggaaaccgcgtgagcggaaagatgctgaccggcagaaacaaaaaagctccccctttcgggggagccggcatcgctgcgcgatgcctgagaggattcttatttcagcgcttcttccagcaccttcagcaggtgcgggatatccagcggctttgcgatgtggccgttcatgcccgcattcaaggcgttctgcttgtcctcttcaaaggcgttagcggtcatggcaaaaatggggatgcccgccttgcgggggtcgggcagggcacggatacgccgggtggcttcgtagccgtccatccggggcatctggatgtccattaagatcaggtcatactgcccgggcgcggactgctccatcttttccactgcttcaacgccgtctccggcggtatccacaaggaagcccgcttcctttaagatctctatggcgatctcccggttcagggcgttatcctccaccagcagcaggtgcttaccgtcaaagcttgccttgggctgcagggcgggcgtctgcgtcggttgtacccggaagggctctgccagcaccttgcgcagctccgagaggaacagcggcttttcgcagaaggccgtcacaccggcggcgcgcgcctcctcctcgatatccgcccagtcgtaggcggtcaggatgatgatggggcagctgtccccgatgaccttgcggatctgccgcacgatctcgatgccgttcatatccgggatgagccagtcgatgatatacacgctgaaagcatcaccctgctccacggcgtacttggtgcggatgaccgcttccttgccggagatggtccactccgggcgcatgccgatcttggaaagcatggtgctgacgctcaggcaggtgttggtgtcgtcgtccgccaccagcgcccgcagcccttccagctggggcagctgcttgatctccgccttctgcccgctgagggggaagcagaggttcacgatgaactcgctgcccttgcccggctcgctttcaagggtgatggtaccgcccatcaggtctacaatgttcttggtgatggaaaggcccaaacccgtgccctggatgccgctgacggtggagctttcctcccgggtgaactcctcaaagatgtgcttctggaactccttgttgatgccgatgccgttatccttgatgcggaactcgtaattgccgcagcccttgggcgcgccgggcttctgagcaatgcggatgctcaccatgccgccggtgggggtgaacttgatagcattggaaaggatgttcagcagcacctgattcaggcgcagcgggtcggtgatgatgtcctcgtccaccacatccatggtgtcgatgaacagcgccaggcgcttggagctgatattgggctggatgatggagcgtatatcgtgcacgagatccggcagatgcaccgccttttcctcgatcttcaccttgccgctctcgatacggctcatgtccagcacatcgttgatgagggagagcaggtgctggctggaggtggagatctttttcaggtagtccagcacctgttctttattatcaacatgggtcgccgccagcgaggtgaagccgataatggcgttcatcggagtgcggatgtcgtggctcatgttgaacaagaactcccgcttggcgcggtttgccgctgcctcgtgccggacggcaagctccagcttgcggttctgctcttccagctgggcgtgatacttctgctcctgctcccttttttgctgctccgcaagcttcatggagcggcggcgcagcgtttgcagcactgccacacagatcagatagaagatcagtgccgtcagcagtgcgctgctgaaattgcggaacaccgatttttcgtcgatatagagatacagatcaaaattctgtccgttgctgtacatcccgaaatagcagccggaatttgcccagtcgcgggtgtgggtcagaatgtcgggcgcaccagccttgcggatgccctgcaccagcgggctgttcgtggtgtacagtccgatgaggctcgggtcgtttgcggcgatcaccttgttgtcctgcacgataaagatggtgccgctgatgttcttcgggtagccgtccagcacgctctggatggacagggctgtcccctccacaaactccggcggggtcacccggtacgccagcagcacggcgtcccctgctgcggcgcggcgggtggcaacatccaccgctgtaccatcctgtaacagaatgcgcttgagataggtcttttgcgggttttgcagcacgttcagcgcggcttgctctcgcagcgattccgcaaactgcgcataatcgatattaccatccgtatattcgcacagtgattctccattttcgtccagtacggcaatgccggtaagccagagggattccgtttctttccggagggcttcggggtcgtaaatatccaaagcgtcattttcggccagctgccgcaccgagaccgccatccggcgcagcgactttgcggtgatggtatcgttatatttttcgtagctggtggactgcacctttacaaagttgatggtgcggtcaaagtattcctcggtagcgcgcatggactcccgcccggagaagagggtcactgccagcaaaagcagcacgcccatcagcaggtagagcgccgccacccgcatattgggcgtgaacgttttcttgttacggttcaagggcgtccacctccagatatttttccgggtccggcagatatttgcctacgatctgcttcatcgtgccgtcggcgcgcatggcggcaaaggtctcggtcagcttttcgtccagcccgcgggtgtcgttcagcgcaaaggccacgccgatgccggtgaccagcagcggctcctccagaatgcggaaattggcattgcaatcctgcatataccgcaaaatggcggcctcgtgggcggcaatggcgtccacatagccgcagttcagcatggcgtactgcacgctgcggtcctcggcgctcagcagttcaccaaactgcgggacgcgggggtcggtgccggcgaggaagatttcctccggcttggtggtgctttgcaccatcatggtcttgcccgcaaggtcggcaagcgtttcaatgccgctgtccgcattgaccgccaccacctgacggctgaccatatacggccctacccagcggtacagctgcttccgcccatccatggaaaagcagctccagatgcagtcaatggcgccgctttccaccagcttggttttctgctcccagtcaatgatctcaaaccgcaccgcataccccatgcgggcaaaggcctcggtggcaatgtccacatcaatgccggtgggcgtgctgtcattgttcaggtagataaaaggcgggtagttatcgctgcccaccgtaagctcgggcagtgctgccgccgcctgcgttttgctgcaggcggtcagcccggctgccgctgccgccgcgcacccctttaaaaaggtacggcggggtattttatggttgaatcgctgttctgtcacgcgtagttgccctcacattaccattgtaaaatttcctgcttcagttccccctgcacgtccagcagacactgcagcagcagcgggttgaaggcgccgcactcgccgttcgtgatcatctggacagccgtttcgtgcgggaaagcctttttatagcaccgttcgctggtcagtgcgtcatacacatccgccatggagaccagctgtgcgctgatggggatatcgtcccccttcagcccgtccgggtagcctttgccgtcccagcgctcgtggtgccagcgggcgatctcgtaggcggtctgcaacagcggctggtctgcaaagctttcagtcttttgcagcatctctgcgcccagcatactgtgggtcttgatcaccgcaaattcctctgcggtcagcttgccgggtttattcaggatggcttcgtcaatgccgatcttgccgatatcgtgcagcgccgacgccagcgggatgttatcctgctgctcgggagtcaggtcgtagcggctggtcagctccatcagccggtgcagcagcgtctcggtgatgatgcgaatgtgccgcacatgggagccggactcgccgttgcggaactccacgatctggctcagcacgcccaccagcacatcggtgttcttttcccgcgcgcggatctggtcagacaccatctgcaccagccgccgctgcttggcgtacagcttgatggtgttggacacccgacggtagacgatctttgcgtcaaaggggcggttgacatagtcgctggcacccagctcgtaggccttgcggatggcttcctccgaatcgtcactggagatcatgatcaccggcacgtcctcgatggtgtggttggtgttcatggtgcgcagcacctcaaagccgtccatgaccggcatgttgatatccagcagcaccagcgagatctgcccggcgtttgcccgcagcagctccagacactgcttgccgttctcggcttccagaatgcggtagtcctcgcccagaatgccggcaagcatcatgcggttcatcatggaatcgtccaccagcaggatcacgggcttttcccctaagacatccttctgtgcagccaaccggctgtcctgtgtgtccaccgccacggcgtccttgtggtttttggcctgatacattataaaatctgcccggcgcaccacgttctccatagggtcggcaagggtctgcatcgcgccgccgatgctcagcgacagccggaagtgggggtagcccggcaccaccgtttgctgcacggcggtgcggatctgctccagctttaccttgaaataatccgccgggatgccgggcagcaccagcaaaaactcgtcgccgccgtagcggatcagcagatctgtttcccggatgcagctgcggatggcctttgcaacggtttccagcgccagatctccggcgtggtggccgtaggtatcgttgcaaatcttgaaatcgtcgatatccatcagggcgatgcccgccgggccgatgttattgcgcaccacttcctcgtaatagcggcggttgtaggtaccagtcagggcgtcgtggttcagccgctgccggtagctctgttcttttttcatgttccgggcggcggtctgggcaaactgcgccttctgctcctccatctgctgcatcatccgcagcaggttatggttggcggtttccagcgcttcccgctgagtgcggttctgctgttccagcttttcccgcagttccatatagggggtgatatccgtgatcgtgcccacgatatagcctttgccgtaccattccacctgattggcagcgttggtgacccagcggtagccgtttttgcccagaatccggaagatgctgtcaccattcttggcgtaagtcgcgctgttttccgcgttccggtagcgcagcccggccgccagatcatccgggtgtatcagcgctgtatagcggttatcgaaccttgccgcaaactctgcccgcccccagcccagtatctccagaaagcggtcgctgatataaataaagggatagcctttttccgggtcatccgcacaacagtggaagccgcccggtatattctgtgcatagcgttccagccgcagaaatcctttttttattgtctcgtctgtttccattttacctttcctgcctttttctccgcgcattgcagcacgcagtaccccctgttaccgcaatttcaaactttaccttcctgtacgccccgcttttgggcatactgtaacattttgattctatcatcaaaactgcctagatgcaagcattttttgccaatggaaaggcaggtaaggcaacgcaaaaaagccgccgcacaaaaagtgcagcggctttgcggggtgtcacctcacagccagcgctcagagatgatccaccacataccgggcaggttgatccgacccagcagatgctccaatacgatcagcatgatattctcctttcagaccgtccgtttcagccgaacagccccttcagtaaaaacagaagcagctttgcaaagctgccgccgcccaaaaggctgagcagcggcccaaggccttgaaacatggaaggtttgctcctttcgtttcattccgtcccgactgctgccgggtgccggtctgctttatatacgaaccagcccgccgcaggattgcaaatgccgtggtggtaaatattgggagtaatgcagctgccgtctgcctttacgaccccttcccgtgaaaaagttgctcagaaacgcccgcaggcgtttctgagcaacaaatcaaaaatactatttccgctgaaaatgcccatagcagcgcggagggcattccaaatcgtcttacttaaaacgcttccatgccggggtagacggcgctttcgcccagctgctcctcaatgcgcagcagctggttgtactttgccacacgctcggtgcggctgggtgcaccggtcttgatctggcaggtgttcagcgccaccgccaggtccgcaatggtagtgtcctcggtctcgccggagcggtgggagctgatggcgttgtagccggccttgtgtgccatcttgatggcttccaaggtctcggagacagagccgatctggttcagcttgatcaggatagcgttgcccgcacccagctggatgccctttgccagacgctcggtgttggtcacaaacaggtcgtcgcccaccagctgcaccttgccgcccagctcgcgggtcatctgctgccagccctcccagtcctcttcgtccagaccgtcctcgatggagatgatggggtacttttccacaaggctcttccagtgcgcgatcagctcggcggaggtaaactcggtgcccgccttgggcagcttgtagaagcccttgcccttggggctcttccactcggaggcggcggcgtccattgccagcataaagtccttgcccggcagatagcccgccttttcgatggcagccagaatggtctcgatggtctcctcatcgctggaaaggttgggcgcaaagccgccctcatcgcccacggaggtagccagccccttggacttcaggatggcagccagcgcatggaacacctcggcgcaccagcgcagcgcttccttaaaagagggtgcgcccaccggcatgatcataaactcctgtgtatccacagtattcgttgcgtgtgcgccgccgttcagaatgttcatcatgggcacaggcaggcggttgccgtttacgccgcccagaaaacggtacagcggcatctccagcgaagcggctgctgcgcggcaggctgcaatggacaccgccagaatggcgtttgcgcccagattggacttatccttggtaccgtctgctttgatcatggcggcgtcgatggcgtaaatgtcggaggcatccatgcccaccactgcgtccgcaatgaccgtgttgatgttctccaccgccttggtcacacccttgcccagatagcggctcttgtcgccgtcccgcagctccagtgcctcaaactcaccggtggatgcgccggaaggggcacagccgcgcgccacagtgccgtccgccagcgtgatttcggcttccacagtggggtttccgcgggagtctaagatctcgcggccaacaacagcttcaatttccagataattcatcttgaaaccctcctgaatatcattttctctcccgtactgcccgggcgggcagacggggaactgctctatttagacggttatatataactaaccgtcaatatcctaccacgctttgcaccccggcgcaagagccggtgcgtatgtttgcagacctaaatttttaacgggaacacaaaccgccgtggaaaacccgtttacagtctgcccccttgcggcagcggggatacgttatgcttaccatgtgttttttatatggcatatatgccaaaaattttctttactttttggcgattcggttctatactggttgcggcgttttcgctgttttcccatttatagtcgttatagaggaggatttttgcaatgaataaggatctgacggtgggcaagccgtcacaggtattgtggcaattctgtctgcccatgttcggcagcatcattttccagcagctgtacaacatcgcggatagtctggtagcaggcaagttcatcggtgagaacgcactggctgcggtgggcaacagctacgagatcaccctgatcttcatcgcctttgccttcggctgcaacatcggctgctcggtcatcgtgtcccgctactttggcgcaaaggaataccgcgagatgaagacctcggtctacacctccctcatcggctctgccgtgctgtgcgccgtgctgatgggcatcggtctgtttggctgcgacgccctgctggagctcatcaacaccccggaggagatccttgcagattctgcgctgtatctggatatctacgttctgggcctgcccttcatgttcttctacaacattgccaccggcatcttctctgcccttggcgacagcaagacccccttctacttccttgcagtctcttctttgtccaacatcggcgtggacatcctgtttgtggcaggtttcaagatgggcatcgccggtgtggcatgggctaccttcctgtgtcagggtgtcagctgcgtgctggccatggtggtggtgttccgccgcatccgcgctttccacaccgagggtcatgtgcagctgttctcgtggaatatgctgggcaaggtggccgtggtggctgtgcccagcatcctgcagcagagctttgtctcggtgggcaacatcatcctgcagagcattatcaacacctttggtgccagcgtcattgcaggctactctgccgccgtcaagctgaacaacatggtcatcacctcttttaccaccctgggcaacggcatctccaactacacctcccagaacatgggtgccggcaagatggaccgcgtcaaggaaggctttggcgcaggccgcaatctggtgtggctgctgtgcgtgccgctggtggtgctgtacttcttctttggccgctttttgctgctgctgttcatgaacgacccgcagggccctgccattgacaccggtatgctgtttttgcgcatcctctcccccttctactttgtggtatcggtcaagctggtggcagacggcatcctgcgcggctgcggcctgatggtgcggttcatgatcgccaccttcaccgacctgattttgcgcgtgggcattgccgccgtgctcagcgccaccgcgctgggctccaccggcatctggatggcatggcctgtgggctggtgcatcggtacggcgctttccatggtgttctacgtcaccgccatccgcaaggcactggcagagccgttggctgttgccgaggccgagggacaggccgccgaagtccgcgccgaggccgaatttgccgccgacgccgagatggagaccctgtaacctttttgcaacatgtgaatttgtttcatgtcacagataaacaaaatgaacaatttgaaatagtgcacaaaattacgctttaatttttgtataaagtatcaacaaagccgagaaaatgcgcccaaaagtatggacggtttgtgaattgcggatttgaacccagatagctataataacagacaagaatagaagcaaggccgctttagaggggaagggccttgcttccgtttttatcaatttactttatagaacactccgaaggaggagatttttatgaaaaaggtgttcactcgtcgtcagttcatggccgctgccggtgttgctgttgcagcaggtgccctgaccgcctgcggcggttcctccgcaagcactgccgcttcttctgctgctggttccgctgctgcttccggcagcaccatcaaggtgggtgtgatgggccccctgaccggtgacgcttccgtttacggtcaggctgttgtaaacggtgccagcctgtacatgaagcaggtcaatgccgatggcggtgtcaacggcaagcagctggagatcatcaccatggacgagcagggcgatgaaacgcaggctgtgacctgctttaccaagatggtggatcagggcatcaccgctctggtaggcgatgtaaccaccgctcccacgctggctgttgccgccgagagcgccgattacaatatgcccatggtcaccgcttccgctactgccgaggctgttacctacgatgccgagaccgacaccgtgaacgggaatgtgttccgtgcctgcttcaccgaccccttccagggcgtgaagatggcagattacgcttacgagaagctgggctacaccaaggcagccgtcatcttcctgaagggcaaggactacaacgagggtctggccgagaactttgccaaggagtttgaggcaaagggcggcaccgtcgtggatcaggagagctactctgagggcgacgtggacttcaagacccagctgaccagcatccttggcaagaaccccgagatggtgttctgccccaactactatcaggaagtgggtcagatcctggctcaggctgagagcatcggcttgaccgttcccttcttgggcggcgacggctgggatggtctggagggctacgccaccgccgaccagctgaaggactcctacttctgcgcctgctacgctaagggctccagcgccgcgtttgaggatgcctacaaggccgagtacggcgaggcctaccccaacggctttgcacccttgggctacgatgctgccatgaccgtcgtgtacggcatcaaggctgccgaggagcagggcctcgaggccggctccgacgagtacaagcaggccgtcatcgatgccattgccggcggcaccatcgagggcatcaccggcacctttaccttcgacgagcaccacaaccccgtcaagagcactgccatcctgacctacgtggacggcaagcccgagctgaaggaaatgttctgatccgcgctgttccatccaccggtgatggagccgcccgcacagagcaaaccccatgattttttggagaacgccggaacagcttttttctggtcaggcgttctccgttttttatatcaaaaagtgtaaacgccgcaaagaaaggaagtatccaaccatgacagtgttctttagccagctgatcaacggcttgtcccttggcagcatctatgcactgatcgcactgggctacagcatggtgtacggcattatcctgctgctgaactttgcccacggcgatgtcatcatggtgggcgcatacatgtcctggttcgtcatgaaccagctgggtcttggcccggtcaccgctgtgtgcgccaccatcatcacctgtacgctgctgggcgtggtgatcgaaaagatcgcctacacccccctgcgcagcgcaccccgtatctcgctgctgatcaccgccattggtgtctccttctttctggagtacacggcagagctgatcctcggctcgggtgcaaaggtgatccccgcctactacaccaaccagaccttccgtctgggcaaggtgccgctgggtcttacttcgatcatcacgctggtggtcaccgtgctgtccatgctggtgctcacctttctggtgcaaaagactaagctcggcaaggccatgcgcgccgtttcggaggatatggatgctgcccgcctgatgggcatcaacgtcaacagcaccatatcctttacctttgccgtgggctcggcactggcgggcatcggcagcgtgctgtactgctgctcctacccgcaggccacccccaccatgggctccatgctgggtctgaaggccttcgtcgccgccgtgctgggcggcatcggctccatcccgggtgctatggtcggcggcatcgccatcggcctgtgcgagtgctttgtttccgccatcggcctttccgcttggaaggacgctgttacgtttgcaattctgatcatcgtgctgctggtcaagcccacgggcttccttggccgcaaggtgcaggaaaaggtgtaagggggcataacgatgaataccaaacgcaagaccctcaaaatgcccgtgcgctacctgatgaatctggtgttggtggggctgctgttcgtggggctttcctatgtgaccggcaatatgctgtccacctaccagaataaggtgctgctgaccgtgggcatcaatatcattctggccgtctcgctgaacgttgccaccggttatctggggcagctgccgctgggtcatgccggttttatggcggtgggtgcctatgcctgcgccctgttcaccaaatcctcgggcctgcccaagggcgtcgcctttgccatcggtctggtgctggcatgggtaatcgccgggctgttcggggtgcttatcggcatccccgccctgcgcctgaccggcgactatctggccatcctgacgctgggctttggcgagatcatccgcatcaccttgaacaacattgatgatgtgctgggcttcaagctgttctacggctccaagggtctgaaaaacatccccaagtattccaactttaccaacgtgttcctgtgcgtggtcatcacctgtttcctcatccacgccatgatgaagagccgccacggccgtgctgtgctggccatccgcgacaacgagatcgccgccgagagctgcggcatccaaaccacctattataaggtgatggcctttgccttctccgctgccttcgcaggcttggcgggcggcctgtacgcctgctacatcggcgtgctgaacccctccaccttcggctttatgaagtccattgagatccttgtcatggtggttctgggcggcatgggctccatgctgggctccattctgtccgctaccgtgctgaccatcctgcccgaggctacccgcagctttgagagctaccgcatggtggtctattcgctggtgctggtgctgatgatgatcttccgcccgggcggactgctgggcagctacgatttctccctgagccgcatcgtggaaaaggccatgaatggcgaactgttccgcaaacataccaaaaaggaggccgctgaccatgagtgagttcaagaccagactgcacagtgtgccctccggcggttttctgaccgaccgcgacaaggacaaaaagcccattctggacgtgcgtgagctgggtatcgacttcggcggtctgaccgctgtggacaactttaacctgatgatcggccgcaacgagatcgccggtctgatcggccccaacggcgcaggcaagaccaccgtgttcaacctgctcaccaacgtctaccagcccacccgcggctccatcctgattgacgggatgcccaccgccggaaaaaagacctatcaggtcaaccgcatgggcgtggcgcgtaccttccagaacatccgcttgttcaaggagctgagcgtcatcgacaacatcaaggtgggtctgcacgagtccatgaagtataatctggcctcctccctgctgcggatgccgaactactggaaagaggaaaagcagtgcactgagcgtgcgctggaactgctggacatcttccacatggcagaccttgccaacgcgcaggccggcagcctgccctacggcgcacagcgccggttggagatcatgcgcgcactggctaccggcccgaagcttctgctgctggacgagcctgccgccggtatgaacccctccgagacggcggagctgaccgagaccatccgccgcatccgcgacgagttcaacattgccgtgctgctcatcgagcacgacatgagccttgtcatgggcatctgcgagggcattgcggtgctgaacttcggccgcatcatcgccaagggcaccccggacgagatccgcgataacccgcaggtcatcgaggcctatctgggcaaaaaggagggctgagccatggctgatacattactgaaggtagacggcatcaacgtctactatggcaacatccacgccgtaaaggatatctccttcaccgtcaatgcgggcgagatcgtcaccctgatcggtgccaacggcgcgggcaaatccaccaccctgaaaaccatttccggtctgctgaagccccgcaccggcgatgtgctgtacaagggcaagagcatcaagggcgtgcgcgcccacaagatcgtggagagcggccttgcacaggtgccggaggggcgccatgtgttcctgcacatgacggtggacgagaaccttgatatgggcgcctacacccagcccgcttccaccattgccgccaacaaggaaaaggtgttcaccctgttcccccgcctgaaggagcgccgcaagcagctggcgggcaccatgtccggcggcgagcagcagatgctggccatgggacgtgcgctcatgagcaacgcctccatgctgatgctggacgagccttccatgggtctttcgccgctgctggtgcaggagatctttgacatcatccgcgacatccacaaggagggcatgaccatcctgctggtggagcagaacgcgcagatggcgctttcggtggctgaccgcgcctatgtgctggagaccggccgcgtggtcatggacggcaccggtgctgagctgctgaccaacgagcgcgtccgcaacgcctatctgggcgggtaaacggaaaaatagtttgatttgcagttccgaaacgcccttggacgtttcggaactgctttttcctgctatcactttactttcgtaaaaaattgtgccataatgggtgcagtattccggctttgcaaaagccacgccccggctcgggaaagcggggcgcaaaccacacagaatgaggggtaaacgttatgagcaagatcatcatcccggcaaactacaaacccgcgctgaacctgtacgacacgcagcgcgccatcggcacggtgaagcggctgtttgccgataccctgtgcgccacgctcaacctgtaccgcgtgtccgcaccgctgtttctggaggcttccaccggcctgaacgacgatctgaacggcgtggagcgcaaggttacctttgacatcaaggacagcggcaccgaggcacaggtggtgcagtcgctggcaaaatggaagcgtcaggcgctgaaggactacggcttccgcgtgggcaagggtctgtactgcgacatgaacgctatccgccgggacgaggagctggataacctccactcggtctatgtggatcagtgggactgggaaaagatcatcacggtggaggaccgcaacgagacctacctgaaaaacgtggtgcgctgcatcgtgtctgcggtgtgcgccaccgagatgaacctgcacgccatgttcccccaactgcaggagctgcccctgcacacccccaacgtgacctttgtcaccacgcaggagctggaggacaagtaccccgatctgaccccgaaggagcgggagaacgcctttgtcaaggagaacggcaccaccttcctgatgaagatcggcgcacccttgcgcagcggcaagcctcacgacggccgcgccccggactacgatgactgggatctgaacggcgatttgctgttctggaacgacccgctgcagtgcagctacgagctgagcagcatgggcatccgtgtcagcccggagagcatggacaggcagctgaccatggcgggctgcgacgaccgccgcaccctgcccttccacaaggcggtgctggctggtgagctgccctacaccatcggcggcggcattggccagagccgcctgtgcatgctgctgctgggcagcgtccacatcggtgaggtacaggccagcgtgtgggacaaggccacccgcgaggcctgcgccaaggccggcatcccgctgctgtaagcagaacgttttttcagcggaaaatatttttggtttgaatacagccaagcctgcgggcttggctgtatttcgctttttcttttataaaaaccaagaagggacagcctgtgggctgtcccttcttctattttatatattattagttctgctttttccagcggcgcatgacacccatgcccagtgcataggggccggtgtgcaccgcaatggtgcagccgatctgcaaaagccctacctcgcactgtgcgccggggtacttggcgcgcagggcggcacgggtctgcatccacagacgcttgccctcgtcggcatcgtagccgtagcccaccgtgatgcggtaatcgtccggggtgccgccgtgggcatccagatagttcatcagctgctccagcgccttttcaaagctcttctgtcggccgcgggctacgccgccggagaagatctctccgtccttgaacaggatcatgggcttgagtcccagcatattggcggcgcggccagttaccttgccgatgcgcccgcccttgatgaggtagtccagatcacccacggtgaagaagatctggttggtggatttttccgcttccagccaagtcacagtctcgtccaaggtgcagcctgcatcccgcatggccacggcattttccaccatggtggattcggtcacggtggcggcggcagagtcgatgacctcgatgcgggcatcggggtagtcctccagcaccagatcccgggcgttacgggcgctgcccacgcagccactcatcttgccggtgaacaccagacacaataccgcccgacccgcctcggcgtgtgcgcggaaggccttttcaaagtcctcgatggaggccagactggtcttggggtaggccgccggattatccaccatgaactgataaaagtcccgcacagggatctccagcccttccttgcggtaatgctcgccgtccagcgatacataaaagggcacgacctcgatgccaagctgcttggcggtgtccagcgtcaggtcgcaggcgctgtcggtaatgatatcaaacatctgtgacgcttccttttctgaaactcgggggctgctttttgcggcagctcagccgcggtggatgtaggcctcgcgctctgcgcccaccgagatataggtgatcttgcagcccacagccttttccaggtattccacataatcgcgggcctgctggggcaggtcctcccacttgcgggctgcggtgatatcgcagtgccagccgggcaggtactccaccacgggctgagcggtatccagtgcctcacccatggggaagcgggtggtggtggtgccgtcggtcagcttgtaagcggtgaccatggggatcttttccatgtaatccagcacatccagcagggtcagagcgacctcgtcgcagccctggcagaacacgccgtagcggcttgccaccagatcgatggggcccacgcggcggggacgtccggtagctgcgccgtactcgtggccggcctcacgcagagcgtgcttctcttcctcggtcatagccagttcggcggcgaaggggccgtcgcccacgcaggaggagtaggccttcatgacgccgatggagttgttcagcttgtggccggggataccggcaccgatgggtgcataagcaccgatgacgttggaggaggtggtgtaggggtagataccaaagtcgatatcgcgcagggcacccagctgtgcctcaaacagtaccttcttgccggctgcatcggcatcggccagatactgccccacatcgcagatatagtccttgaagatggcggcatacttttccagccatgcccacatctcgtccacgctgatgggcgctgcgttgtagctgccctccatgaccagattcttggaatccaccatggtgaccagacgcttcttcacggcgtcgtccagatgcagcagatcgcccatgcgcagggtctttttcatgtacttgtcgccgtaagcgtaggcaatgccgcgcttggtggagccgaactgtgcgccggtcttggacaggcgtgcttcctccagaccatcctgctccacatggtagggcatggtgatggttgcgcggtcggagatcttcaggtttgccggggtgatctcaatgccctgctcgcgcagcttattgatctcgccgtccagatgatgcgggtcgatgaccatgccgttgcccataacgcacacgacgttggagcgcaggatgccggagggcagcaggttcagcacgaacttgccgcgctcgtttttaacggtatggcctgcgttgttgccgccctgataccgtgcaacgatgtcatactcttggctgatcaggtcgaccatgcggcccttgccctcatcgccccagttgatacccgtaattgcagtaagcataataaatgacctctttatccttttttcaaaagacagccttttccgtgcaccttgcccgggatacgctaccttgggtaaaacgcaccggtttgctgcccttgcggcacgcaccaatgctattatagtatagcacagtctgccgcgcaaaaaaagggggaatgcacctttttgcggcgtattccccctataaaatcccgttctcagctgcgctctccggtcaggtcggtgcggcgggtcaccttgtggatggtgccgtccggctcctgaatggacgtgcgctccagctggctgcgcaggctggccttgatgtcggccagatactcctgccgcagcgtctgctgctcggctttttcgacctcggtcaggccgacggtcttgctctttttggccagcgcattgatgcgggcgatcttttcttccgtcatgggagaacctcctgtatttcatcgtaaaatatgctataatgtaggcaagaccattatagcaaaggatgataccaatggcaacacaacgcaactatgcccagcagatggacgccgtgctggcgggccttggcggtacccgcccgcgccttttgctccacgcctgctgcggcccctgctccagtgccgtgctggagcagctgtgccggtattttgagatcacggtgctgtactataaccccaacacatggccggcagccgagtattaccgccggggcgaggagctgcagaagttcgtggcagcagcccacccgctgggggtgaccgtggtggaggacacttacgacccgcagcagttctacaccgccgtagccgggctggaaaacgagccggagcgcggcagccgctgcaccgtctgctaccggctgcggatgcgccgcgcggcgcagtacgcgcgggacaacggctttgactggttcaccaccaccctgtccatcagcccccacaaggacgccgcactcatcaacgccatcgggcaggaattggaggcagagttcggggtaaagcatctgccctcggacttcaaaaagcacaacggctacctgcgcagcctgcagctttcggagcagtacggcctgtaccggcaggactactgcggctgcgagttcagcgccaaagcaagaggcattgaaggataacgcaaaatgatttaaaatgcgctgcgcgttcgctttgcgcatcatcagcggaatcattatttataatttcggggttcaggaaagtctgcggactttcctgaaccccattttcacagaaagggttatagggaggcggcacatcattcctccggcagttttgccaccagaatggtaaagaccaccagccccacgcagggcacgatgttggaggccataccggcggcaagccccgcacgctcggccacgatgccgatgacccacggcatcaggatggcgccgctggaggccaccggcagcatgatgcccatgctggtcacgctggtcatgcggcccgcgctggccacggcggtggggttcagcccggacatggagatggcaaaggcgaacagcagcgcaatggctgcgccctgcgtgtgcgccatgaccagcagcacatagaacacggtgcacagcacgctcatgcccaccatggccttgcggggattttttaaggggaacacaaaggcgatgagcagacgtcccaccagcgtagcgccccacatcacagtgacggtataggccgccagcgtgcccgcaataatgccgctgcccttgaagtaggtcaccatccagccgttgacgctctgctcggcggcgttctggaagaacagcagcccggtcagcagccagaagcgggcagagcgcagaaagctccagtcgatggcttctttctctgcgctgcttttactcttgccgccgcgcagcggggtaaagacgtacaccagccagagcacaaggcccacgactgccagcagaaagacggccagctcggtgcttacccgggctgccgccgcaatgaggaaggggcacagcagtgcgccgcaggcgtagcagctgtgcatcaggttcatgccccgggtgcggtcggcggagtgatcgctgaccagaatggtacaggtattgatgacgctgcccttggcgatgcccaccacaaaaaaggctactgccagcagcgccactgcgccggtcagccccatgacggcgtagcccaccgcatagccgatggtcagcagcagcacactgcgtttcatgcccagcgcactgggcagcatgcccatcagcagccctgccagcaggttgcccacgctcatcagggagagcagcgtaccggtcatgccgtaggcaaagccgtagcgctcctgcagcagactgaccaccacacctgcgctgatggcacagatgccgctgaagaaaaaggtcgcaaagcccgcattgcgcaggcgcgtgttctgttgttccatggtgttcctctccttgcggaaatatcctttctctatttaaccattttttcgcatctttgcaaccggattttcttacaaaaagcagcaaaaaaactgccgcacaaaacgtgcagcagttttttcttttataataagtatttctcagtccagatcttcggcttccagcaccgcaacgccttcgttttcaaaggtcttgcggaggatatcagccagacccgggttgggtgccttgttgtggatgcacagaatgatcttaccgttcaggctggcagcctccacgcccacggatgcaccgtccggcggcacccagacgccaaaatccgtggtgtactgtgccagttccggagtggcgggcatgagcggattgcccagatagctgagccagaaatccgaaatcgtgccgccgatgtactcgcccatctgaaacacccgctgcttgatgcgcaggggtgccttttgctggttcaccttgtacacccagcccatctgctcggtcatgcggcggcgcttggactgcggctgcagatcccgcctgatgtctgcatctacatcagccacaaaatctgccaggcgggtctgggcttgcagctgcaccgtatgcccaaagctgcatacgcagttgtacagcgcattcggcacaccggccacatcgcgggtatcggaggagtaggaatactggatcttctccttgcccagatactcccgcatggccatacacagcagacccatcagagcgcttaccggctttgcgttgttcgccagcgctttttccacaaggctctgcttgctcaggcacacccgggtgcggcgcagcgcaccctcgtaggtctgcaccacatcccgctggatgacatcgctcccgtactccacaggcgggtactctgccagcatggtctccatatcatagggcgggtcgcacacgatctgcggcaccgcaaaggccgtgccgtaacgcaggttgcagtactgctccagaatgctggtgagcaggggcgataccccgtggccgtccagcaggaagtgatgccagtcaaagtagacggtatccccttcgcagctgacgcagaacaggtagccgttcgtctgttccgggatattgcgcatggtgctgccggggtacacaaggcagggctccgtattgggctccagccacatctcccgcttttcctgcaccagacgctgcgtataatagggcgcacttgccaaggccgctgtcagtgcccgctgcaaaagggtgatatccaccgcatcccgcagcgagaactggtaccggcactggatcttttcccgacggaaaaagtacatgattccctgaaagttatattccgtcgagcgctgctgtgtttccattggtttttaccccacgtttgctgccagataatccaccagatcacccatggtgacaaagttgcgcagctccttttccgggatgcgcaggccaaaggtctcctcaagatctgccacaatggtcaggatctccatagaggacagatccagatcgtccatcaggacgctgctttcggtcacatcctccggcgatacctctgcgacatcctccagaatagccgtgatctgagaaatgatttctgcacgttccatcgtattatgcttcctttctgttgcgttttacttgcgcaccagcttgcctgcgccgttgcggggcagcggcgtttcgctgaattccaccacgccaatgcgcttgtacagcgggacggtgcggttcatctgggcaataaagtcccgcaccgtctgctggtgctccttttcacagtataccacaacacctatctttttgcccagttcttttacgatacattcctgtacggcaggacatttttctaacatgccctccagctcttcggggctgacgttctcgccgctgtccagaatgatcaggttcttcttgcggccggtaatgtagtagtagccgtcctcgtccacccgggcaaggtcgccggtgtggaaccagccgtccttgtcgatgaccgcagcggtggcctcggggtccttgtagtagcccagcatgatgctgtcgccccggatgcacagctctccgtccggctcgagcttgtagtccagataatcgttgccctgtcccacagcgccgatgtgctttgcatcctgcgcgtagttgatgatgccatcgccgcaggtctcggtagcgccgtaggtctgcaccacgaacatcccgttggtggccatatccagcatcacctgcgggtcaaacatcgcagaggagcagatgggcacccacagctcgcccaagcgctccttgcggccgcgcatcacgtccttgtgcagggagttcatgatcaccggcaccaccgccatgacctgactgggcatccgccggatctccttatagaagttgcggatatcgccgctgatgttcagcgcccagcccccgtgtgcccaggagaacaggcagatgaatgcgcccagatggaacatgggcagcaccgtgtactggctgaccacaagctccgggtcgtgcttatactccatcatgcgctcaccgatctgcacatgggcgcgcatcacgctgaagaagttgcgctcgctcagcatcacgcccttgctgcggccggtggtgccggaggtgaacatcaggatcatcaggtcatcgtggccgatgcagcggggcatctctgccaccggctcataagcgcggaagccgtccatggggcgcaggatgctgccgtaggcggcctgcagctgctcttttgtgccgtagtcgtcgccgtcggtcaggatggcagcggggtccaccagccccagctcgtaggacagctcgtcccagctcttgtgctggttgagcagtaccagcacgccgcccgccagaatgatgccgaaggtgttcacggcatattcgtagctgtttttattcagcaggcagatctttttgcccttgatatccgggatggtgctctggaagtagctgaccgcacggcggatatcccgcgcgtagtccttataatggactgcggtcacctcgtccgtttccttatcataaaagcggagcgccacacgctccgaaaaacgctgttccatattcagggtgaccagatcatacacgttgtccaataccttgatcattgtattttcctcctgcgttgttatttcatcctgcggcagtgtgctgtactgtgctcagtatacaatattttccaatgcaatgcaatacttctgcaacatttaatttctcactttgacaactttcaattgcgcatcttggaatacgccccggccaaattctacctttcgttgcaatccgccggttttcgtgctacaatttttagcgcaaaataccagttccggtatggtgcagactgcaaaacaaaattgacagtctctataaaaagcattatactagccatatatcatggcaatgctgtataaaaactgatcatttgcgccgtatccggctttttctcgaggggtattggcccggcgcagggaaggaatctttcatggaaacaaccaagccccgcactgtcaactccatcgggatgtttgatatgctcaagggcgctgggatgctggccatcgtgctgggacacactgcggagctttacccactccagctggagggcggcctgtcgctgacggcctttgtcggctttatctaccgcgaaacgctgatggcggccttttttattgccagcggctacggcttccgcaagcgctccatcagcaagtgcatccaccagcagctcaaaagcctgctcaagcccttttgctacactgcggtgttcaccacggtgctgcacttcatcattcattataaaacctttcactatctgcccggctccatgactgaaagcatcaaggtggcaggcggctttctgctgggtctgccccatactgccacctacttcgggcaggagttcttttcctgcgggcccatgtggtatctgctggcgctgttgatgggctggatcttactggacgttatcctgaacatcttcccagagcggtacatcccttgggcggtgggcggtgccgccctgctgggctggggtgccagccttgtatgggagctgcccttctgcctgatccagggcgcggtgatcacgccgtacctgtaccttggctaccttgccaaacggcagcattggctggatcagcctttgtcccgccggatgtcctgcatcctgtgggcagccgtactgctgatcccggcagccgcccttgccacccgccgcaccgactgtgtatccatggccgagtggtcgctgggccccatcagcatcctgctggacggccttgccggtctgctgtttatccggctgtttttgcgctggagccagcgccgcaacccgctggtgcgctttttcgaggccatcggccgccgttctctgtacatcttctgcgtacatacggtggagctgatcgccattccgtggtatctgttcgccgccaaatacgccgaccgccctgttttgggcatcagcctgcaatacatcctttcgctgggctccatctggctgatctgtgccctgctgcagcggcggcgggatctgatcatcaagttgttccccgcccggcggcgcacccctcaggtacattacgccccgcggcactgatttttctgaatgttttggctgcggcggtgcagctgttataggataaaggaagaggaggatcccgttatgaaccacgatgcccccatgacccctgctgccatgcaggcgcacattgccgagctggagcagcagctcaagctttcggacgagggtgtttcccagctggcgcagcggtgtctggagctggagcagcagctgctggcttgccagaccgagcttgccaagcacagcgccgaggctgagaatatcacccttaccctgccgcagctgttctacgacaccggcagtggcttttcgccccgggaatgcctgactgccaccgaggatgtctacaacgaactgacccacgaggtctcggtcacctttgtcctgccggaggacgcacgcgccatccgtctggaccccggcgagttggcctgctgcatcaccgaccttgccatctcggacgagcgcatcagcttccagtcggtcaacggccttctgctgcaggaggacagcctgctgtttttggacgtagaccccaacctttcgctgcactgcaccaccggctttggtgccggcatgaagtttgcggtgaactatcactactacccgctgggacgttttctgcacgagcagcccggcaagtctctgctgcgggcgctgaacgacctgaagcttgagaacgccgctgccgcgcaggaggcagaggaagtattgcaggccagccgcgccgagtgtatgcggctgaaccagcagctgctgaccttgcagggcatccagcacgaatatcaggtttcgctggaaacgatgcgcgccagcagcagctggcggctgaccgccccgctgcgcagactgctgaacctagtgcgcggtcactgagcccgcccgatattctgcccggaggagttggatcatgtacaccagttacagtaccctgcagcgcaagcaattgtgcaagcaggtctataccgatacccagagcacctatcttctggtctacgcgccggggcgtcacaaggcgctgcaagcggcgctgcaaaaccagctgcaccgcaagttccgtctggtgacccagcttgaggacgagctgacccccgatgtagccggggtgctgctggtaagcgaggatgtggagtgcacccccaccgccctgacctattttgccgccgccctgcgggagggcgcagaccttgcggtctgcgacgcctcctttggctttgacggctccaccgccctgtacctgagcacccggcacctgcccggcagcagctgcgcactggtgtcccgcgcattgctggacaaggtacgcgccgccgcccggggcaaggacagcgttaccgaactgctgcgtctggcccacgccatggcgcagcacagccgctgcatcccgcaggcgctgctgcacttccgccgggagctgtgcgccgacgatgtattctccgccaagggacgccgtgcgctgattttgagccatgagctgaccatgaccggtgcgcccatcgtgctggtaagtgccgtgccggtgctgcgcagcttaggctttgaggtggtggtgctggggccctcggatgaaggctcgctgccgctgtttctggacgccggggccgctgtggtcacccgcccggactgcgttacttccagcgccctgtgggggctggccaccagcgcagactttgtgctggccaacacggtggtggaagcaccggtggtaaacaccctgaacggctcctttgtgccggtgctgtggtggctgcacgatgcctttgcaggctatcccttcatctcccacagcatccccaaggcgctgggcaaaaacgtgcacctctgcgccgtaggctcccacgccaccgccgccatgcactccgtccggccggattttgaaatcgagcagctgatctacggtctgccggactatgcagccgagcaattcccccgctatgacatcagctttgccggggggcgccccctctttgtgacggtaggctcgctggagcaccgcaagggtccggacatcttctgcaacgccatccggctgctgccctctgcagtgcgggaaaaagctgccttcctttttgtgggcaaagccgccgacaaggggatgtacaacgccgtggacagcttggtgcgggactatccccagaccgttttctaccgcaagcggctggagcgcccggaggtcaaatccctgatggagcagtgcaactgcgtggtgtgcgcctcccgggatgaccccatgcccaccttcgtcaccgagggtctgatcttcggcaagccctccatcgtatcggagcacaccggcaccgccgggctggtgaccgagggcgtggacggcttcctctacaaggacgacgacccgcagcagctggccgacaagctggcctgggccatcgagcacccagaggcgctggctgccatgcacggcagctgccgccgcctgtacgagcagcagttctccaacgaatcctatgtcgccaccctgacaaggctggtaaaagagctgacggacggggaagaatcatgaaaaagcaatgccggacagctgcacgctgcccggcattgctttttcacgggagaggtctccccattttatcaaatcccccaaattgcccaacaaagttccgcctccgttcacaaagggcggcgggagatgtgctatactggttccagaatttccggttatgaaaggagttttgtttccatgagccaagccgccgcgcagcagccctcccgcaaaaaggccgtgatctctctgctggtgctgctggcacttacctgcatcatcgtgttcacttttaaggatcactgggccgagatcactgcggcgctggcgcagctttcggtgtggcaggtgctggcggtgctggcggtcggcctcagctaccccctgctggaggggtgcgtggcgtgggtcatcgtgcgcagccgtctaccgcagttcaccctgcggcaggggctggatgttggctggtgcggcacctttggcaacgtggttacgctgggtgccggtgcggtgccggtgcagctgtactacctgcacaaggccgggctgccgctgggccccggcgcggggctgatgacgctggaatacgttttccacaagagcacggtgctcttgtacgccaccgtgatgctgctgttgcagcaccgctggcttgccgccaacaccaccggtgtcatgcggtatctgcccatggcatacgctgtggtagcggtgattatcgtggcgctggtgctgctgtgcgtctcgccgttggtgcagaacctcgcccgctggctgctgggctttttgcccaagaccgaaaagtggcagcagcgccgcgccgactggctggagcaactggaggtgctgggcaccgagagccgccgcctgctggcagataagccccgctgcctgaaaatttttgccctgcaggcgctcaagttgttcggactcttctgcctgccctacctgtgcatccggttcatggggctttccccgctgggcttctggcaggtgcagctgctcaccagcctgatgctcttcgtttccaacgctctgcccaacgtagccgggatgggctcgatcgaaacggcctttttgctggtgttcggcagctttctgaaacggggcgaggtgatgagcgtgctgatgctctaccgcatcgccagctattatgtggtatttgccgccagtgccgtgggctttttcatcgcccagcggcatctggtgcaaatggagccgccaaaggaggggtgagcagatgaaaagcttccacattccccgcaccgctttattttttatcctgtttgcactggcagcttttgcggtgctataccatcccatcaacctgaaagcactggtacgtgccagctcgcagggcacgctccgcaccgaggaagtggcgcattttggcagcacaaacgacatggactatcacctcctctccatggacagtgaagcgttccaacaaacggcagaattgctttccaccgtctcctgccgcaaaaagctgaaccagaactattctgcctacacccacgatacctttccggtgcagtcggtcaccgtcagcttttatgacgatgccgagaaccagaagtttctgctgacggtgtattctgacggtgtgtgcatcctgaacagcgcctttgtcagcgtaaaataccccggcggcggcgcagcgcagctgtatgaacagctggcggggatggggcagtaaaaacgattttgaatgccctccgctagc

SEQ ID NO: 13834 - DNA, 1493 bp, Unknown
  gut microbiota DNA sequence
aaatgaatgatatcgggcttaaattcatctatcttcttcaaaagcttatacgtctcgaaccatgcgaagcaaccattaaaacctgtaattcgagcaagagcgacatttactcggcgactattgaatgttccgattcggtaatagccgcaatcctcacccgcatcacgatttgttgtggtgataggcgatgcgcacatcacctcgtgtccctgcgctcttgctacatcggcaatccccatcatgatttttccggtgctacctttcgctccaccattgatctgcacaatacgcatcactcgtactcctcactgattatcactaaagaacttatatcctctacgcctcatgattgcctttgagagattgaacagcggcttcggaagccactcacgcagccatgtccggaattcaagcatccattcatctttagctcgcatatcctctcggtcacctttataaataggattctcatcgaaatacttgcgtgccttcgtcagcacctttcccttacgaatcacgtcaagaatagggaattccccgcgtcggctatctgcgcaacgggcattcagctgtcgtgccatattcgtcaacgcaacctcatactgccaggcattcagcgttttcgtcagcgttttttccataaaatccttacgccagatgcctgcatacagactgacaatgtagtcacctgcataattgtccagcagaaaaataccctgttccaattcctcagcttttctgtttctcagactcttcatggtcataacaaacaaacgcagataatcaatctgatgcttttccatgatctgaatatcttcgttgaccgcctgagtcgaaatcctttccgtcaggaaatagtcatccaaggtaaagagaacatactctgtcttaatcagcggcatcaccgctctcagacgttccgttatttccgtgccttcgcctgctgccaccactgttacattttcaaaagtacgatcagtgggtttatcggttactaaaaacgtctccacgtttcggtctgcccaattctgattcaaaagcaaaacatgtgcatcccacaaatccgaaaacttgtcgcacgtcgaaataataattgaaaagttattctccatcaccatgtatcctctgccacttatttcatatgttggattgcctttgcaaccacattttctgaggtcttgcagctagcctgcagattatgatgctctcttgtcatcacaatcgcctgttcgtagtatttcttttgaatttcctgattagaaatcagctgtgtaatcgaatccaccaatttagctttattcgtacaaaccattgccgcatccgttgactgcatatactcaatgatgccgctttctagcgagccatatgttagaatggatgcaccactcgccaatgcgtccgctgccttcgtagagagtgaataccgtgaaaggttgatgtccttttcctcaaatccctctacaataacagttatgtcgctttctgccatgcgc

SEQ ID NO: 13835 - DNA, 13208 bp, Unknown
  gut microbiota DNA sequence
ttccgaacacagaagttaagcttacttgtgccgaagatagttagctggaaacggcttgtgaaaataggtagtcgccgacttaactgaaagctctgagatgaaagtctcagggcttttttgttgcataaaaatatggcatgatttttggttgtaatgccaataggtcaggacttgacagaaacactactatgtaatacaatgtagataagctactacgcattacatattagcggagaggaggacttatggaaaacaatgcacaacttttaaagggcgttctggaatattgtgttctgaaattgattgctcaagagccgacctatggctatgagatcgtgatgcatctgaaacaggtcggattttctgacttgagcgagagcacgctctatccgctgcttttgcgcttggagcaacagggaaaggtcacggtggagcgtagaccttcccccaagggaccgagccgaaaatattacattgtaacggaagaagggcggcgggcgcttcttgagtttcggcaggattggagccagctctgccagctggtggaaaaaatttttaaggaggagccagatgaataagtattttgcattgcgaaaaacaaaccggatgcgtaccgagttgctgactgaaaaaagtcaggagcagcttaaagaagtgattcgttatcttcgccgggtcagctgggacttctgtggtatcgaacttgtgcgcagcgatttgcttgatattgcaatccaagccaacaaggaaaatcaggaactgtttcattcgatttcggacgcaaagacctttgtggaagaggtcaagccaagcttgaaaacactgagagccggagattacttctggtatgttgcaccgttgtatttcttttttgggtggggcgtggaaggcttgctgctctatccggtaattggaaattgggtttttgaactatccgtagggtatctgatgcagcttgttgttgcagtggcggcgttttgcgtacttttccgccggatgatggagcaggtaggctttccgccgcgagagcattggctgaaatatgctgcatggctggtgctttatatcgtgattttatatggaacgggctggttctttacccagatcgcgggtaagattgtactgctgcggcttccgattcttagctattcggtcttttgcctgcttctgggtgcggggctgtatgcggtacatttctggagatatggaaaagattcgcgtctgagtgctcgcatataaagcaaaaagcgacttcgctgcactgtgcataacagtgcgacggagccgcataccttattgggtagttgccgacttaactgaaagctctgagatgaaagtcttagggcttttttgttgcatgaacataaaaacacatagccgcaaatttgcaggaaaaagcgcttttgtctcgtgttacaaggtgaaagcgctttacaattttgcaaaaaggatgcgattgatcatgaaacgattccaccgccgctgtcggcggctatgtattctggcggcactgcttgtactgctggtgctgtttctgcggcagaacgttctgctggatacagccagccgacacgcgatcttactggacgcccaaagcgggcgggtactggcgcagaaacgtgctgacgagcgtactgcaccggcttccctgacaaaaatgatgactgtactgctggtcattgagactgagcccgatctggacaaacaggtaacactgccggaggatatttctccagccttacagaccgaaaaagcatctatggcgggctttgtacccgatgagactgttacggtgcgtgacctgctctatggtgcgatgctgccctccggtgcagaatgctgtgaggcgctggcgcagctggtgagcggcagcgaagaaaactttgccacgctgatgaaccaaaaggccgcagagcttggcatgaagaatacccattttacaaatgcaaccggcctgaccgacactgagcactattccagcgcggcagatatggcaaagctcttgcaggcagcgctgcacaatacgaccttccgcacaatttttacaaccgagcactacaccactacggcgactgcacagcacccggaaggcgtttcgctgaccagcacactgctgggcaagctggacggaacggagcttccgacgggaacgcggatcgaaggcggcaaaacagggtataccgccgccgcagggctgtgtctggccagccttgccaccgtgaacggaaaagagtacatccttgttacgcttgccgcgcccggagaccatgggactgagcagtacaatatccgcgatgcagtgcatgtgtaccggaaactagcggataaaaaataaccgcgctacacagggctcgccttgcaaaccgggtgctccggcggtacaatagggacattctatcatggaaaaggatgtttgactatgcgagacgaagccattgatctgtgcggacaggtggattttacccgtaccgacgctatgccgctgctggagcgggatacgcagttccactttgcctgtgcgggctgcggcaactgctgccgcgggcgggaggatatcgtgctgtccgggtatgacttgtggcgtattgctgcccggctgcgtctgccgccgcagatcgtagcccggggttattgccgcagcagcattggcagggtgagccatttgccggtgctgcggcttgccccggtgaaggaaaaccgcaacaactgcccctttctgaccgaaaaccactgcgccatccatgaggctgagccgctggtgtgtgcgctgtatccgctggcgcaggagatcagccgggcaggggaggtgcactattttttgcagcccaccggctgcggcgggcaggtgatcgaagcaagggtgcaggattaccttgcccgctacgatgtgcccgcccgggaagccattgacgtgcgctgggcgcagacctgcatggcgctggaagataccgtggagcagctggaggcagtgctcagcccggtgctggtgcaccggatgcaggcgaagctctggcaggcactgtattttggctacgattatgcgcaggactacctgccgcagctggaagcaaacctgcaaacgctggacacggaactgcacaaactgacggagtatcagaaaaaacgaaataatagttcgaaataattgatagatgactttacttgaatcgataattaaggccgttttcaggcaaaagtggattgttttgccagcgattctgtgttatacttcacgagtgtaaagcgaaccttgtttgatccgcttacaatatcggcccggagtgcggcgtcctgttggctgcaagggctggagatagaggagatcatcaatatgcgtaaaatcactcgtcgttccttcctgactgcagccgctgcctgcggtgcagcagctgccctttccgcctgcggcggttcttcctccgcatcttctgcggcagcgtcctccacggttgcttctgcatcggtcgctgccgctgccaacggcgaaaagttcaccgttggcatctgccagctggtgcagcacgctgcactggatgccgctacgcagggctttgaggacgctctgaccgcttcctttggcgagaacgtcaccttcgacttccagaatgcacagggcgattccgctacctgcgccaccattgccaacggctttgtttcctccggtgtggcactgatcatggcaaatgctacccctgctttgcaggctgcacaggctgctaccaacaccatccccattctgggtacttccgttaccgagtacggcgtggcactgggtctggataacttctccggcaccgtgggaggaaacgtctccggcacctccgatctggcaccgctggatcagcaggcagacatgatcgtggagtggatgcccgaggtcaaaaaggtcggcctgctgtactgctctgccgaggcaaacagccagtatcaggtagacgaagtgcagaagtatctggaggctaagggcgtgactgctacccagtacgctttctcggattccaacgatctgtcctccgtctgccagaaggctgcagacgagaacgacgcactgtatgtgcccactgataacaccgttgccgccaacaccggcatcgtggacggcatctgccgcccggctaagaagcctgtgttcgccggtgaggagggtatctgctccggctgcggcgtggccaccctgtctatcagctactacgacttgggctacaccaccggtgagatggcagttaagatcctgaacggcgagagcgacatctccaccatgcccatcgagtacaccgatgtgaccaaaaagtacaacaaggccatctgcgatgaccttggcctgaccgtaccggaaggctatgtagagatcgaagcctgataacagcaaaaccggaacaatataaaaatagcggagaagagttgattcttgctcttctccgctttcccgtatcaaagcgggagataaaaaagtgtaacgtttaggaggaaattgttttggagatcattgcgagacttgcaaacctgccgggcgctttaccgggtgcctgtgcgcaggggcttatctggggtatcatggccattggcgtgtacctgacctaccgtattctggatgtagccgacctgaccgtggacggcagctttggtaccggcggcgcggtgtgcgtcatgtgcctactttccggtatgaatgtctgggcagcattgctggtggctgtgctggccggccttgctaccggccttgtcaccggcctgctgcacacctttatgggcattcccgccattctggccggtattctgacccagctggcactgtattccatcaacctgaagatcatgggcaaggccaaccagtccatcaacgtggataaatacggcctgctcatctccctgcgctgggtcaaggaattttccctgcacaaccccatcatcatggtcatccttgctacggcggttgttatcggggtgctgtactggttcttcggtacggagctgggctgcggcatccgcgctaccggctctaaccctgccatgtcccgcgcacagggcatcaacaccaacttcaacatcgtgctgggtctggccatttccaatgcgctggtggctttgtccggtgcgctgctcagccagtatcagggctttgcagatgtgggcatgggacgcggtgctatcgtcatcggtctggctgccgtcatcattggcgaggccgtgtttagccgcatcttccataactttgccctcaagctggcctctgtttccatcggcgcgatcatctattatatcgtcattcagctggtgctgacactgggctttgatgcaaacctgctcaagctgctcagtgcctccgtggtggcagtgttccttgccgtgccgtactggaagggcaaatacttctcgaagccggtcaaaaaggcaaaggaggacgcaaaaaatgcttgagatccaaaatgtttccaaaaccttcaatgcaggcacggtgaaccagaagatcgccctgaacggcctgaacctgaagctgaacgagggcgatttcgttaccgtcatcggcggcaacggcgcaggcaaatccaccatgctgaatgccgttgccggtgtgtggccggtggacgagggcaagatcctcattgacggcgtggacgtcacccgcctgagcgagcatcagcgcgccgcttacattggccgcgtgttccaagaccccatgaccggcactgccgccaccatgcagatcgaggaaaatctggcgctggcagctcggcgcggcaagcgccgcaccctgcgcatcggcatcaccaaggcagagcgggagcagtaccgtgaactgctcaagacccttgatctgggccttgaggatcgactgactgcccgcgtggggctgctttccggcggtcagcggcaggcgctgaccctgctgatggctaccatgaacaagccgaagcttctgctgctcgatgagcacaccgctgcactggaccccaaaacggctctgaaggtgctcaccctctcggcacgcatcgtggaggagaaccatctgaccaccatgatgatcacccacaacatgaaggatgccatcaaatacggcaaccgcctcatcatgatgcacgagggtcacatcatctacgacgtggcaggggaggagaagcagaagctgcacgtctccgatctgctggccaagttccagatcgccagcggcggcgagtttgcaaatgaccgcatgatcttgtccaactaagcaagaacagaaggacgttccatccgcttacggttggagcgcccttttttatcccgcgattacaatgcaaaaaacaggctccctgccattggcagggagcctgttgctgtatgcggcttaccgcttgatatcgtaattcatgttcatcaggttgcggatggtgctcacatcatcggtgatgttggcatcgccgtggatggtgtgtttgatggcgctgctggccactgcaaagttgatcatatccatggctttgtagttgtgcagcatggcgtagatcaggccgctggcaaaggcgtcgccgccgcccacgcggtccagaatgttaaaggtgtacagtttgctctcgaaggtgtgaccctcgtaccacataaaggccttcaggctgttttcactgccgctgtgggcgtagcgcacatggcgggcgatgcacttcaggttggggtagcgctcgataaaccgctggaaaatctcgtcttgctgctcgtagctgggctgcaggggcacaccgtccttccagtcgcccttgctgtggtcgttttcgtccttccacaggtggtagggctcaatgcccagcagcacatccacgtagggcaggcactcggtgcagaagtcccgtgcctcctcccaagtccacagggtggagcggaagttgccgtcaaagctcacggtcaggcccttcttcttggcaaccttcagcatatcaaggatcaggctgcggcagttgggtgccagtgccggggtaatgccgctgaggtgcagccagtcgtagccctccagcaaggcgtccagatccacctgagagaaatcgtactcggtaatggcactgtgcttgcggtcgtagatgaccttggatgcgcggatgccgtagccggtctccagataataagtacccagacggttagaaggggtctcgtccggctcggtcaggatcatgggggtgcagtgcacatcgttggagcgcagccagcgcacagcgctcttgcccagactgttgttgggtactacgctgaaaaaggtgctgtccacgccaaggtttgccagcgccagcgcaatgttggcctcgctgccgccgtaactggcctcaaaggccgatgccatgcggatcttttcgtagttcggcggggtcaggcgcagcatgatctcaccacaggtgatgaacttctggccattgggctcgctgccaaggatcggattgaaatgttccataaagctcctcctgatgacattgcggaaacccgcaactattaacacatcgttgtatccattatagtgcgttcccggacagaatgcaagcgtttgcacgcgcaagcaagagaaaataagaccgaaaatttggtaaagttgctgaaaaggctgctctgccgcagaattacactccggtcaggtcaaagctgggggtgtattcctccttggcgctgctcttctgctgcatatagccctgcacaagtcccttgtccatggcgtagttcaccactcggcggtattcgtaggtggtgatgcgccgcccgatgccgtgctctgcggccttgtagaagggagtgtactggctcatgacgctgggcagaaagcacccggggtcggcatcgttccatgcagccatctggtctagcacggcaaagctgtccttcacatgacccggcagcgccagatgacgcaaaatgacccccttttgcaggatgccgtccgcatcgaataccggatgtccggcctgcgccatcatggcctcgatggcgggctttgcctcggcaaaatagtccggcgcggcggaaagctctgcggaaagggcagaggacacatattttaaatcagccagccagatgtcgatgtacccgcgccaagcctctacgctttccacggtctcgtagccgccggtgttgcacacgatgggcagacgcagccctttggtgcgggcaatgtccagcgcggcaatgatccacggctgccactgcccgggggtgaccagattgatgttgtgcgcgccctgcgcctgtaaattcaaaaagatctcggccaagtgctccacggtgatctctttccccagcccctcggcactgatggggtagttctggcagaagcagcacttgagggtgcagccggaaaagaacaccgtgccgctgccccttgtgccgctgatgcagggctcctcccagtggtgcagggcagcgcgggcagcttttagcgtagcgcccgccccgcagaagccggtgcgcccggcggcacggtcagcaccgcagcggcgggggcagagggtgcagcgggaggggatggaaatggttttcggcataatatccaaagtcctttgcttaaaattttcgtattcagtataccacttttggtgccattcgtgctatactgaaatatagagaaacgataatacaaaaaacgcaacatctttgcagggcaaggaatgcgttatgatggaggagaccatgcgcaccgaaaccgatgagattcgcgataatctgaaatatctgaccctgctggccagagattacccctcgcaggcggcagctgccagcgagattatcagcacacaggcgctgctcaagctgcccaagggcaccgagcactttatgagcgacctgcacggcgagaacgaggcctttgtgcacatcctgaactctgcctccggtgtcatccgggaaaaggtggatgccgtgctgggtgacaccatgccggaagcagcccgtgccgagcttgccaccctgatctattatcccaccgaaaagctgcctcagcttaaagcacgctgcactaccgaggatgcactggagcagtggtatacccaaacccttctccagctgatcgatatctgccgtctggtgtcctccaagcacacccgcgaccatgtgcgcggctgtctgccctccagctgcggctatattctggacgagctgctccatgcccactttgaggatcacgataaagacctgtactacggccagatcgtgggcagcatcatcgagaacggccgcgccgaccgctttatcgtgcggctgtgcgagctcatcaagcatttggcggtggataagctgcatatcgtgggcgacctgtttgaccgcggcccccgcccggacattattctggatctgttgatgcgtcatcacaatgtagatatccagtggggcaaccatgacgtggtgtggatgggtgctgccgccggcagtcccatctgcatctgcaccgtacttaagactacgcttgcttaccacaaccacgggatgctggaggactgctacggcatcaatctgcggcacttgcagcgcatggcggagcagttctacggcgaggacgacctttccatctggatgccccacacggatgccgcccgcggcccctatacggagggaatgctccaccgctgcgccgtgatgcacaaggccatctccatcctcatgttcaagttggaatgtcaggtcatcgaccgcaacccggatttccagatgcaggggcgggactatctgcgccgcatcgactgggacgcccacaccgtgcaggtgggggagaagagctatcctttgcgggacacctctttccccacggtagacccggcagaccccgcaaagctgaacccggacgagcagctggtgctgcacaagctggtacagtctttccggcagagcgaaagattacagcagcacattgaatttttgtacgccaagggcagcgtgtaccacattgaaaacggaaacctgctctaccacggcgctgtgcccatgaatacgaagggcggttttgcagtggagcactttgaggggcgccgctactccggccgtgccctgatggattactgcgacgcccgcgcccgccgtggctactacggggcagagggcagcgctgcccgccagagcggacaggattttctgtggtatctgtggtgcggcaagctttcgccgctgtttggccgcagcgccatgaccacctttgagcggctgtatatcgcagactccgccacccatacggaggtcaaggacccctattatagctggtacaacgacgaagccgcctgccgccgcattttggcagagttcggtctgccgggcacgagccatatcgtcaacggccatgtgccggtgcaggagaaaaacggcgagagccccatcaagggcgggggacggctggtggtcatcgacggcgggttctgccgcgcctaccacgaaaagaccggcattgcgggctacacgctggtatattccagccgcaccatgtccctgcgcacccatcagccctttgaaagcgcagaaaaggcggtgcgggagaacttggatatcctgtcccagaagaacattctggagactgaaaatcatcgcatcctcgtggaagatacggacgagggcgaggtgctgcgggaacgtgtgcatgacctcaagcagctggtaacagcctatcagctgggctggatcccggaggcacggtgcgaggatcacgtttggtgatatcgccaaagggtgaaattggggtcggtattcgtcaaaattgatgaaaaattcaataaattattggaatatccgcgtgtaatctgggcaaaacagaaaataatgaaacagatacaaatcgggctttgcttttttgtggaagtagtgtataataggatagttataaatctgccccggtgttggtgaatctgtacaccccggcagtacaagtaacgagatggaatgctttcagtagccttaacaggcctgtggcacaggcctttgacaaggagatcataaaagtggagaaatttgttattaccggcggtaagcccctgcacggagaagtgaccatttccggcgcaaaaaatgcggctgtgggcattctgcctgccaccattctggcagcggatgtctgcgtgatcgaaaatctgcccgatatcagcgatgtgtcggtcagcctcaagattctgagcacccttggtgcacaggtgaagatgctcaaccgcaacacctacgagatcgatacgcggcatctggtcactaccaatgtgccggacgatctgtcccgccagatgcgcgccagctactacttccttggcgcactgctctcccgcttcggcaaggcacaggtggccatgcccggcggctgcaatctgggcccccgccccatcgaccagcacctgaaggtgttcagtgcactgggcgcagaggacagcgtggattacggcatgatcaccgtgcgcaccaagcaggagctgaccggtgcccatatcttctttgataaggtcagcgtgggcgctaccatgaacggtatgctctctgcggtcatggccaaggggcagaccattctggaaaactgcgccaaggagccccatgtggtggatctggcaaactttttgaatatgtgtggcgcagatgtgcgcggtgccggtaccgatgttatcaaggtgcgcggtgtggaaaagatgcacggctgcacttacagcatcatcccggatcagatcgaagccggcagctatatggtcgctgccgcggccaccggcggcgatgtgctcatcaagaatgttacccccaagcacctggagcccatcacggccaagctgcgccgtgcagggatcactgtggaggaatttgacgatgctgtgcgggtatcccgtaccggcgatattctgccgctgaagatcaacaccatgccgcaccccggcttccccaccgatatgcagcccctgatgggtgtgctgctgagcgtggccaagggcaccagcaccatcaccgagagcgtgtgggacaaccgtttccgctatgtggacgagctgcgcaagatgggtgccagcgtgcaggtggacggtcaggtggccgtgtttgagggcgtagaaaagctcagtcccgcaccgctgcgcgcttccgacctgcgtgccggtgccgccatggtggtggccgctttgatggctgacggcaccagtgagatcgaggaaatcggccatatcgagcgcggctacgagaatatcgtggaaaagctgcgcggtctgggcgctgatatcagcaaggtggagcggatgcccgctgcgctggaacaggccctgtaacacaaacaacaaaacaaacagcctgccgtaagttctgtgcggcgggctgttttcaggtggtaacataagaggttttcatggcagagttcatttcattgtattccggctcctccggcaacagcagcgtggtgcgctgcggtgcgcagtacctcatcgtggatatgggcaagggcgtacgcaccaccacggcagcgctcaaatcgctggggcttgccgtcagcgattgcgcgggcatccttgtcacccacgagcacagcgaccacgtcaaggggctttccactttcctgaaaaagaacccgatgccggtgtacggcgcagcggctacgctggattttctggacgccaacgatatcgtgcccgccaactgtgagctgaacacgctggagggcagggaagaggacatcggctgcttcggggtacagtccttccccaccagccacgatgtaccctgcgtaggctaccgcattcataccccggacgataagaccatgaccatcgccaccgaccttggcaccctgaccccgccggtgcacgaggcgctttccggctgcgaccttgtggcgctggaaagcaactacgacctgcacatgctgcgcagcgggccctacccctactatctgcgcgcccgcatcgagagcgtgcggggacacctttccaacgacgagtgctccgcaaagcttctggaactgatccagagcggctgtaaaaagttcgccctgtgccatctctcgcaggagaataacacgcccagccttgccttgcagaccgtgttcaccaccttgggtgcagccggtgtcgtgccggaaaaagactgcatcgtgcaggcacagcgccgcaacgaggtaagccctgcattagagttctgatttgtcacaaaataaagccatctgcaacagctgattccgagggcttcgaacctcgacatgctgcggcagatggctttttctttgcgcagtgctgcgcatttattttgcaatggtttctctcaagagatgt

SEQ ID NO: 13836 - DNA, 116533 bp, Unknown
  gut microbiota DNA sequence
aacgacttattctgcggctttctgtacccggatatcactgcccagaaactggatctgcacaaaggctgcaagacggctggagatcttctccgtatacagcttttccagcagcgcaccgtccgtgatattggtggtgacgatggtaggcagctttgcgcccaagcggttattcagcaggctgtacagattcgtcaggaaaaagctggaattgaactcggtgcccagatcatccaaaatcagcagatcagcgttgcaggcagtctggaacaaggtctcctcctcaccgccggggtctgtgccgaaatgcagcgcctccagcttgccgaaaaagtccgggcaggagacatagatcacgtcgtagttctgccgcagcacctcaccggcaatggcaagggcggcatgggtcttgcccagccctgcgttgcccaccagcagcaggctttcgcgggtggcaggggagaagtccgcggcgtaatcccgcaggtcggccaaaactccggccatgtagctgcgcacgctctcgcccagtgtcttgtccaccgtgttggggtagtagtctagctgcatggtgtcaaagctggagatggacaggctggacagctcctcgatctccttccggcgcagctgctgcattacccggcgcacacaatcgcaggtgcggccgtccgccgcgccggtgtcctcacaccgcttgcaggtgaactttggctccagtgcatccgcagggcgtccgcttgcggccaacagggcagtcagcttctgctttgccgccgcaagggcggcagcagtctcggtgcggtccttgccggaggctccggcaatggcgcagcggatgccccgcacacgcacttcctcctcggcgtggcgcagcccggggatggcagcttcggcctcggcctgtgcatcctgcgctaaggcgcgggcggtctgacgccgcatggctacggtgcgcagtgcctgctgatacaattcgtttttggtacgcataaaggctccttactccggcttcttgataagagaacggcggcgggtggcgtttttcaggatatcgtttccgctgggtgcagcgcggtccacccggatatttcggcttgccccggctgcagccaccggcccacgcacatcgtggatgctgcgtagacccttggcgttccatgttttcaggatgctgttccagtaccacaggtcgcgtttggggccggcctgtatggcagcttcctgcaccatggcgtcgtcgtagccgtacacctcgtaccagcgcgcaatggctttgcgcccgcccagcgtcagctcctcgggggaaatctgcagcagactgctgacgtattcctcgcggctctggcgcagcgccagcagctttaagtgggcatcagcctgctcgccggtctccacgccctcagcgcgccagaccttcagctcatgggtcacagcggccatggtgcgcttgccccggctggccacataggctacgcagagcatcacagtctcaggcgcaaagccttcctgcacatacaggttcaccagcttttccatctcggtatgggtcagcggacgggcaaagctggtctgcccgcagtcgatcaggctggagatcatagggtcggtgcggctggcggcggcgatctccgcccagcgcataggggcaggggcgctgggctctgcgcccggcgcggcgttctcctcatagcgttccaaaagccctgcacccgcccagaaagccagcgcactctcggcgctgatgcggctgcgcagcttgaggtcggcgcagatcttgtccgggtcggtcacgccggtggccagtacatacagcgctacccgcacattgtattcttcggcaatgcccagcttggagaacaccagctgcggcacggcgatggtatcgcccttcagttctttcaaacggtagatcatggtttcctcgttcagtttattcgttggcagtatccggctcggcaggcggctcccaggggtcgcagtccatcatgtccgggcagttgttccagcgctccggctcggcatcgtaggcgtctttcagatactgcgcagcggcggcacgcccttcgtccgtaagcggaaatacctcccggcggcgcagggcggggtcggtcttgtcgatcgtccagggcgcgggccagtagtccactgtgaggatcttttcctccttggtggcatccgcgccgccgtccgggtccggcacggtgcgcttgcccggggtaagccggtagcgcagcccggcctcgttgccgctgtaatcattcttgcacaaaaagtagtgcagcaggggaacaaaaatcatggtgcagctcgtcctttccggcaaaaggcgcggccttttgcgcaatcaattctattataaagccgccgggctaaaatgcaacaactttttgtgaaacactctgcaaaagctgccccgcttacaggaaatccggccttgacagcaccgtagaaatatggtaaaatattgcctgttgcagcagatgtgcaatgtgctactgtggctcagctggtagagcagctcactcgtaatgagcaggtcgcctgttcgaatcaggtcagtagctccaaagaaaaacccccgaaagttggcttgtgaagccggttttcgggggttttgctttgtgcggaaaagcaaagccgccgcaccctgcccggaaactccggcagcagaatgcggcggcatactgttacaaaaaacttacttagagatcttctggccgatccagatgcagatgcaggcaccgatcaccgaaatggcaaaggaagaaaagctgccggaggcgtggatgcccagcaggccgaacaaaaactcgcccacaaagctgcccagcacgcccatcaggatgttgcggccaagggaagtttccgtgcccataaagcgcccggccagatatccggccagcgcacccaccagcacgcccacaaaaagggaagccagcacacctaccagcgtcagcaggccggtcaggcagcccaccagcacacatagcagggcaatgatgagcaaaatcgttaaagtgatcatagtttatacctccttaaaaattatggctctgcctgctgcccggcggcttcgcgggcggtgcggcagatgtctttcaaacagcatttttcgcattccggcttgcgggcgttgcacaccgcacggccatgcatcacaaagcggtggcaaaggtcgctgccttcctccggcgggatgatcttccacagcgccatctccaccttttgcggttccttaatgccgcccacaaggccaattttattgcacagccggatgcagtgggtgtcggtaacgatggcgggcttgccgaacacgtcccccataatgaggtttgcgctcttgcgccctacgccgggcagggcaagcaattcgtcaaaggtgtcgggcacccggcagtcgtacttgtcccgcagcatccgcatacaggccgagatatcccgcgccttggaatgtcccagtccgcagggcttgacgatggcttcaatgtcctccggctcggcggcagccaacgccgccacgctggggtattttgcaaacaactcctccaccacaatgttcacccgggcatccgtgcactgggcggccagccgcacgctgaccagcagttgccatgcgtggtcgtagtccaaggtgcaaccagcatccgggtattcggccttgagacgccggatgacctccagcgccagcgctttttttgcggtaagattctccggggctttttttcgtaccggcatgggacaaacctcctttaaaagggaatacctgaatcataccatgtttgacaggatttgtaaatgtttgcagggcattatctgagaatgattttcagaaaagcccttgtcctccttttctaaatgcgctatactatataaaaagtgccttgcgggcagggaaggagaaaccaccatgaatgaaccacttgcgcagcgcctgcgtcccaaaacgctggcggatgtgtgcgggcagcagcatctgctggctccggggcgggtgttccgccgcaccatcgagagcggacgcatccccaacatgatcttttacggtccctccggcaccggaaagaccacggtggcacgcatcattgccgagaacagcggcatgaccctgcacaagctcaacggcacctcctgcggcaccggggatatcaaggcagtgctcaaggatatcggcacgctggcagcggcgggcggcattctgctgtatctggacgagatccagtacctgaacaaaaagcagcagcagagcctgttggaatgtatcgaggacggcagcgtcaccctgatcgcctccaccaccgagaacccctatttctacatctataacgcgctgctttcccgctgcacggtgtttgagttcaagccccttgccgcagcggacgtggagcgcggggtacgcaacgccgtgcagcgcctttccgaaggggaacaggtgccggtatgcatggacgaggacgcctgcgcctatctggccgaaagcgccgggggcgatctgcgcaaggcgctgggctgtctggactttgcggtcacggcagcgccggtggaaaacggagaaaagcgcattaccttagatatgatccggcaggtcacccgccgcaccgccatgcgctacgaccgggagggcgatgaccactacgacattgtgtctgcctaccagaagtccatgcgcgggtccgacccggacgcggcgctgcactatctggcacgcctgctggaagcaggagacctgccctctgcctgccgccggttgatggtatgcgcctgcgaggatgtgggacttgcctatccgcagatcatccccatcgtcaaggcggcggtggatgccgccaacatggtgggtctgccggaggcgcgtctgccgcttgcggatgcagtcattctggtggccaccagccccaaatccaacagcgcccacgatgccatcaacgcagccattgcggatgtgcaggccgggcgcaccgggcccatcccgcgccagctgcaaaacaagcactttgacggcgaggatgcgctggtaaaggggcagaactacaaatacgcccacagctacgccaaccactgggtacagcagcagtacctgccggatgtgctgaaggataccaagtactacacctttggcgacaacaagaccgaacaggccgcccgggcgtactgggcaaagatcaaaggggacgaaaacgtctgaaccgtgtgaaaaaggaggatggatatgcgttattcaaaacagcgggaacttgtcatgcagacggtgcagcagctgtgcgaccacccgactgcggaggaaatttacgataaagccgcgcaggagtgcccgaatctgagccttggcacagtataccgcaacctgaacagtctggtggaagccgggcgggtgcgccgggtgtccattcccggcaaggcggaccgctttgaccacaccctgccgtggcacagccatttgtactgcaccgtctgcggcggcgtcaccgatgcagaggtggacggaaaacaggtgatggagctggtcaaaaaccagaagggcagggtgcaggactgtgccgtggtgctgctgggcgtgtgcgaagagtgctgccgcaggcaggatgcagaggcggcagcggctaaacaggcataaaatttgcgtgtttcctcttgcccgcagcggccaaacagggtatactaaagagtgtcttttgtagaatggcagaaaatagagtttcgccgcatggggctaccctgcccggcggagaaggatggtttttttggaatacattaactttgaacataataccgctgccgccgagctggtgcggcagacctacgacaccccgccgctggcctttgtgcacagctacggctgtcagcagaacgtcaacgacggcgagcgcatcaagggcgtgctggtagatatcggctacggcctgtgcgataagcccgaggatgccgacctgattttgttcaacacctgcgctgtgcgcgagcacgccgagcagcgggtgttcggcaacgtgggcgcgctgaagggccttaaggaaaaaaagcccggcctcatcatcggcctgtgcggctgcatggccaaccagaagcatgttgtggaaaagctgcgcaagagctacccctatgtagatctggtgttcggcgtggacggcatcgacaccctgccgcagctggttgccaagaagctgcaaaagcataagcgggtgctgctggaccccgcccagcgtccggtcatcgtggagaacatccccatccggcgcgagagcgagttccgcgcatggctgcccatcatgtacggctgcgacaacttctgcacctactgcatcgtgccctacgtccgcggccgcgagaagagccgcaagcccggcgatatccttgccgagttccgcggccttgtggaagcgggctataaggagatcaccctgctggggcagaacgtgaacagctacggtaagggtctggaagagcagatcgatttctccgacctgctcaacctgctgtgcaccgtgcccggcgattaccacatccgctttatgaccagccaccccaaggacgccagccataagctcattgataccatcgccgcccagccgaagctgtgcaagcacctgcatctgccggtgcagtgcggctccgaccgacttttgcagcagatgaaccgtcactatacggtggagcagtatctggagctcatcgattacgcccgcaagaccgtgcccggcatcaccttctccagcgatatcatcgtgggcttccccggcgagaccgaggaggactttgtaaaaacgctggaactggtgcgcaaggtgggctatatgcagctgttcacctttatctactccaagcgcactggcaccaaggctgccgaaatgccggaccccaccccccgcaaggaaaagaccgaccgcatgacccgcctgctggctacgcaggacgagatcgccatggcgctggtcaaggcgcaggtggggcagaccgtccgggtattggtggaaggcttcgggcgtaatgaaggcaccctttccggccggttggacaataacctgaccgtggagtttgccgccgacccggcactgctgggcagctacgcgactgtacatcttaccggtgcccgcgccaccgtgctgctgggcgaagtggaagcataaaaacgtgattccggggcaaactgccccagaaagaataaaaaacaacaaggagaacccaatcatggattgcattgatcttttcaagcgtgccgctatggcacttcagaccgacccccgctacgtcattctggatcaggcccgcaaggcaaacgataaggatgaggagctgcagaacctgatcggcgagttcaatctggcccgcatggacctgaacaacgagatcggtaagaacgagcgcgacgacgcccgtatcgctgagctgaacgagaaggtgaacagtctctacggccagatcatgggcaacgagggcatggtggcatacaacgaggccaagcgcgagtgcgagaatctggtcaactatatcgacgccatcatcaacaccgccatgaacggcggcgaccccatgaccgtgcaggagccttctgcctcctgcaccggcagctgttccacctgcggcggctgccactgagcaaacttttttgaccggaacgcggctgtgcaacacagaccgcgttttgtttgcaccggcggttacagcccgcaaaccggctgacggaaccatacaagggaaagaggaaaaaccatggcagagctttcgcccatgatgcagcagtatcttgaaatcaaaaatcaacacaaggacgaaattcttttttaccgcatcggcgatttttacgagatgttcttcgacgatgccgtcacggcctcccgggagctggatcttacccttaccggcaagcagtgcggccttgcggagcgcgcccccatgtgcggcgtgcccttccacagctacgagggctatgtggcgcgcctgattgccaagggctataaggtggctatctgtgagcaggtagaggaccccgccaaggcgaaaggccttgtcaagcgggacattatccgggtggtcacccccggtacggtcattgaaagcagtatgctgcaagacgaccgcaacaactacattgccagcctgtacctcaagggcaaaaaggcgggcctgtgctttgcggacgtttccaccggtacggcgcatatcaccgaactgacggcggataagatcgcctcggcggtcattaccgagctgtgccgctaccaccccagcgaggtgctgctgaaccccggcctgctggactgccgcgaggtgaccgcctacatcaaaaagaacatgagctgctcggtggaactggtcgaggacgagcgctatgcgccggggctgatggcgtctgcgctggaggagcagtttggccgcgactggccgcagaccaccggcatagccgccgagggccttgtgcgctttgccatggctgcgctgctggaatacctgcacgatacccagatcaagggtgtggagcggttaaagaccgtcattacttacaacgaagcccagttcatgcggctttcgccggttacccgggcaaatcttgagctgaccgagactctgcgcgggcgcgaaaagcgcggtaccctgctgtgggtgctggataagaccagcaccgccatgggcaagcggatgctgcgcagctggatcgagcagccgcttatttccagccagctcatcaaccaccgcctgaacgctgtggaggcgctggtgcgtcagactatggtgcgcggcgacctgaccgaagaattgcactacatcgcggacatggagcgcctgatgacccgcacggtgtacggctctgcaacccccaaggagatctacacccttgcccagacctgcgatcgtctgcccggcctgcgcaagcaggctgagggctgcagctgcccggagcttgccgagctggccgcaagtatcgatccgctggaggatatcaaggcgcgcatttatgccgcagtagacccggaggcaccctccaccctcaaggatggcggcgtcatcgccaagggttaccatgccgaggtggacgagctacgctccatccgcgataacaccaagggcgtgctggcgcagctggaagcccgtctgcggcaggagaccggcatccccaagctgaaaataggctataatcatgtgttcggctacttcatcgaggtgagcaactcctacaaaaaccttgtgccggagacttacatccgcaagcagaccctcacctccggcgagcgttacatcacgcaggagctgaaggagctggaaagcaagatccttggcgcgcacgagcggctcatctcgctggagcgccgcctgtttgatgagttgctggagagcatcggtgcccaactggaccgcatccagcgcaccgccaacgctattgcacagctggatgtgctggctgcgctggcgcaggtggctgcggaaaacaactactgccgccccgtggtggacgacagcgatgtgctgaccatcaccgaggggcgtcacccggtggtggagcaggtgctcaagggcagtatgttcgtgcccaacgataccaccctcaactgcaccaccgaccgctgcctgatcatcaccggccccaacatggcgggtaaatctacctatatgcgtcagaatgcgctgattgccctgatggcgcagatcggttcctttgtaccggcagccagctgtcatgtgggcgtggtggacgccatcttcacccgcatcggtgcctcggacgaccttgccgcaggtcagtctacctttatggtggagatgaccgaggtagcggagatcctgaaaaatgccactgccaaaagtcttgtggtgctggatgagatcggccgcggcacctccacctttgacggcatgagcatcgcccgcgccgtggtggagcatatcgcagaccccgccaaggggctgggctgcaagaccctgttcgccacccattaccacgagctgaccgagctggaaggcaccgtagagggcgtaaaaaactacaatattgcggtcaaaaagcgcggcgaggacatcaccttcctgcggcgcatcgtgcgcggccccgccgacgacagctacggcatcgaggtggcaaagctggccggtctgcccggcagcgtgacccgccgcgcccacgaagtgctgcgtacgctggaggcctctgcgcccaaaaacaaggtagagcagatggattttgacgccttgcaggagtacaattccccggcagtgcccagcgaaatgatggaaaaactggaggctgtggatgtggaaacgcttactcccattgaagcgctgaactttttgtacgagctgaaaaagaccctcaagggcagcctgaacggctgaccgcaaaaatcaaccacaggggagggaaaagaccatggcagtcatccatgttctggataagcataccgcggagctgatcgccgccggtgaggtggtggagcgccccgcatcggtggtcaaggagcttttggaaaactccatcgacgccggtgcaacgcaggtcaccgtaagcatcgagtccggcggcgtaaagctgatcgagatcagcgataacggcaccggtattgatgctgagtatatcccaacggctttcatccgtcacgccaccagcaaaattgaaaagccggatgacctgaacagcatccacacactgggcttcaggggtgaagcactggcttccattgccagcgtggcgcgggtagagctgctcacccgcaccgaggtggacgagtttgccacctgctaccgcatctccggcggtgaggagcagggcagggagcctgccgcccgtgctgtgggcaccaccatccgggtgcaggacctgttctacaacacccccgcccgcatgaagttcctcaaaaaggactccagcgagggcacctttgtggcagataacgtgggtcatgtggcgctcagccacccggaggtcagtgtcaagttcatccgggaaggcaagctgcaatacgtcacccccggcgatggtcagctgcgcagcgccgcctacgcggtgctggggcgggagttcagccgcgacctcatcgaggtgcacttcgaggaagggctgtaccgggttaccggcttgatcaccccgcccaagagctgccgcgccagccgcagtatgcagcatttctacatcaatggccgctatgtgcgcaaccgcaccatcatggcgggcatggagatggcctttaagggaacgaccatgcagggcaagttcccgggcggcatcttgctgctggaaatgcccaccgaccttgtggacgtcaatgtccaccctgcaaagatcgaagcccgctttgcccgggaaaatgacgtgttcgatgttgtttaccatgcggtcaagctggcgctggcacagcccggcaccggggaacgccgctttacctttgaagcggacgaaaaagagaaaactgaaaaagaaaacgatatacaaagcaaaaatactgtaaagaataatcactttacaggactttctgccgtcattccgggtcaggcagaccccggcacgctgcccgcgcagcgctgggaagccccgcagccgccgcgccctgccgctgcaccggtgaaaaccccgtcttttacggcagacaccccgccggtacagcccgcaccgcctgcccgcgcggcggctgtgccttcgtggcggcagtctgcccccgcagaggatattctggacccggtggtcacccttcacagcccggaaaaagcggatgcaaccaaagtccagcccgcaccgctgccattccgggcagcagccggtgaggcgcagctggacgtgcacccggagacggacgccacagccgacccgctgctggatcacatggcagcatggaacaccgtgcctgccgccccggaaatcgaagccgcaacggtgccctatcagccggaggagccggtgcagtccgagcagccggaacagctgggctttgatgtgccgcagggggaagagccgctgcggtacgtgggcgaggttttccgcacctatattttggcggagcggggagacgagctgtgtctgatcgataagcacgccgcccacgagcgtcagctgtacgaaaagctggccgcgaactacggcaacgtgcccagccaactgctgttgcagcccgccgccatcgacctttccgcagaggaaaagcaggcgctgctggaaaatcagcccctgctggaaaacgccgggctggatgtggccgactttggcggcagcaccgtgctgctgcgcgctgtgcctgcggacgtagagccgcagaacgctgaggatttgctggtggaaatcgccgaccgcctgctcaagggcagccgggacgcgctgaacgagcacaccgagtgggtgctgcactccatctcctgccgcgccgccatcaaggcgggggataagtcctccccgcaggagcttatggcactggccgagaagatcctctccggcgaggtgccgcccttctgcccccatggccgtccctgcgtgctcaagcttacccgaaaggagttggaaaagcagtttggacgcatcgtgtaatgcaaaacctgccgtggtggctgtggtaggccccaccgccaccggcaagaccgcgctgggcgttgcgctggcgcagcagttctccggcgaggtcatcagtgccgactccatgcagatctacaaaggtctggatgtgggcaccgctaaggtcaccccgcaggagacctgcggcatcccgcaccacggcgtgggcatcctcaccccggaaaagaccttcagcgtggcggatttcaccgcgctggcaggggagtatatccaggatatcactgcccgggggcatctgccgctgctggtaggcggcaccggactgtatgtgcagagccttttgtacggggtgcgcttcaccgccgaaaaagccccagatggtctgcgcgagcagctgaccgctgaactggaagccaacggcccggaagccatgtacgcaaaactgcaagccgtggacccggaagccgccgctgccatccaccccaataataaggtacgggtgctgcgggcgctggaacactaccgcgccactggcaagcgtctcagcgaacaaaaggccgattcgctgccgccggagcgcccctaccgcagccttgtgctggggctggatttcccggaccgcgcagcgctgtaccgccgcatcgacctgcgggtagacaaaatgctggaggccgggcttttagccgaagcggaatacgtctggcataaccgcgaagccttccgcaccgccgcacaggccatcggctataaagaattttttccgtatttccagcagaccgccacgcttgaggtctgcactgaaaagctcaaacaggcctcccgcaactacgccaagcgccagctgacatggttccgccacatggacggggttacatggctggacgccggggcagcggacgtgcgacagaccgctttgcgcctgacccaagactttttattgaaaggatgatccttatgccggaaacccctcaggaaccgcgccacaagttttctgcgcttaccacgctggcggctgtgctggccacctttttgctggcggcggcagcgtatgtctgctggcaggcggcgcacatccttttcccccagaacgtctacgaaacggcgctgcccatcaccatctccgataccattgaagcggacggcgtgctgctgtttgacgagacctgcatttccggcagcggcaatctaggttaccttgtctcggacggcgagcgggtgtcggcaggcactgccgttgcagagctgtataccgacgccaatcaggcggtgctgcgccagcagctgacccagctcaccagccagatcgacctgttgcagcgctcccagaacaccgcagccacccagctggacggcctgctcaaggagcgctccggtgcgctgtatgacctgctggacgcactggacaccgcccaatacagcgatgtggacgaaagcaccgatgcctatttgctggcgcagaacaagctgtggatcaccaccggcgataccgccggctttgcggatcagattgcgctgcttgcccagcaggcacagaccgtgcaggcacagctgggcaaccccacccagatcgccgcccccactaccggctactttgtccgagctgccagcagcggacggctgaatgccggtgctgcggacattctggcgcagagcccggagcagcttaaagcctatctggactctgaccccgagatgccgctggatggctgcgtaggcaagctggtggccgggttcagctggcagtacgccggggtgtgctccgcaaagcaggccgaaaagctgctgggcgcggacggtaagcccctgcgcacggcggtggagatcagcttccccggccagagcgatgctgccttgcgcgccaccgtttccgaggtgaccattgatgcagaaaaggatgttgcccgctttgtgctgcaatgcaactccatcaacggcgatgtgctgtgcctcaaccacgccagcgcacgcatcagcaccggcgagagcaccggcctgcgggttcccgccgcagcggtgcactacctcaaggaggacggcaccgaggccgagacgcagggcgaaaactatattcccggcgtgtacgtcaagtacggcaacatcgcccgtttctgcaagatcgacccggtggatgccgaccatccgctgatctcggaagacgattacatccttgttttgcccaagggaacggacggttctgtcagtcaggtaaggctttatgacgaaataatcgtctccggacaaaatttatatgacggaaaacttttgtagttattgacatctgctgcaaaaaatcagataatagtaaaagctatttgcattctttttgcaaagaacgccaggcagccgggcgctgcccgaatgaaaggagcagataattatgtctttgctggatagcattaagaagggcctgatgggcgaaggggacgagtacgaggaccagtacatcgatgacggcccccagatggtgaacaacaacagcggcgttggcatcgggatggacgaagagaccgaggagcctgccgagggcaccagcaagaagaacaaggtggtcaacatccatgccaccacccagctcaaggtggttctggtcaagcccgagcggttcgaggatgccagcaccattgccgatcatctgaacaacaagcgtaccgtggtgctgaacctggagtccaccaacaaggaggtctcccgccgtctggtggactttttgtccggcgtggcctatgccaacaacggccagatcaagcgcgtagccaacagtacctttatcattaccccgtataacgtggatatcatgggtgacctgctggacgagctggagaacaatggcgcattctattgatccagcaaccggtgcggtgcggggttttgtgcccgcccgcaacgatgaggaacgctatctcatgcggcatatcgaggatcttgccgatgcggctttttcccgcggcatagcccggtactctgcattcctcagcgaccgggaacagaatcttgcccgggcggcactggggcgtgtcggtgtgcgggacggctggcgttttgacggcggctggcccgaggccgagcgccgggtgctctgtctggagccagagtacagctatggcgagtgtccggtgcgctgcgtacagctgcaatgccgggcactgcccggtgcggcgctccccgcgcacaaggattatctgggcagcctgatggggcttgccctcaagcgcgaggcactgggtgatatcctgctacctgccgatgcgccgggcacagcttatgtgttcgcgctggaaccggcggcaaagcttatctgtcgggagctgtgtcaggcgggacgcacagaggtgtccacccgcctgctggagccggaagagatcccggccttcccggcaccggagcggcagctgctcaccgccaccgtgtcctccctgcggctggacgcggtactctctgccatgctgcacgtcagccgcggcaccgctgcggaactgatcgaggcgggcagggtagagatcaaccatctgccggtagaaaagccccatgctcccgtatacgagcaggatgtgttcaccgtgcgcggcaagggccgcttccggctgactgcattgcccgggaaaagtaaaaaagatcgttctatcattgagttctttcaatattaaaagctatgggaggaaatgactatgctgaccccgcaggatgtccgctctgtacaatttgaaaaaaatctccgcggctaccgtacagaggacgtggatcgttttctggacaaggtcgaggagcagctgcagcagaacgatgcgcaggcagagcagctgcgcaagcagatcgctgatctgaccgcagagaaccagaagctcaagggtgagctgcaaagctttgaggccgatggcgatatgctcaagagcgcgctgatcaacgcccagcgcatgggcgaaaacgtgatccgtgaagcaaaccagaaggctgaggagatcattcaccgcgcaaatctgcggggcgatgatatcatccgcgacgccaacgagctgctgcagaaggcaagcgaccgcgcagacgagatcgagaacgaagccaacgagaagcgtctggctgaagagcgggagtacgaccgcgtccgtctggaggtcacccgcttcaaggcggatgtgctcaatttgtaccgcagccatgtggagtctttgagccgtctgccggagttccagaaggacgctaaggaagtcgaaaaggacgcccccgtacaggatgccgagcctgtgcaggaagctgccgcagagcagcccgccgcacagcccgagactgcccccgcagccgatgctgcagcagccccggccgagcaacctgccgaaatgaccgaaaccaccgaacctgccgcccctgccgatgacgacaaggcggctgacagcagcgaggatttctgggcaaaggacgaaagccagctcaagctggacccgcctcctgctgatatgaagccggacgagccggactacgacgcttttcagggcgtaaagttcagcgagtaaggcacccaacgcaaaaatagaggagagtgtaaaccattggctaagaacaaatcgcagtacgacagcacgttgaatctgcccaagaccctgtttgagatgcgcgccggtctgcccaaaaaggaaccggtcatgctcaaggattgggacgacaacgacctgtacaaccagctcatgaagcacaacgagggcaagccccagttcattctgcacgacggccctccgtatgcaaacggcaacatccacatgggcaccgccctgaacaagatcatcaaggatatcatcatccgcgaaaagaacatggagggctatcaggctccctatgtgcccggttttgatacccacggcctgcccattgagctgaaggctctgtcctcggtcggtgacaagaagaaggacatctccaagctggagctgcgccagatctgtgaaaagtttgccaccgagcatatcgacatcatgagcgaccagttcaagcgtctgggcgtcatcggcgattttgagcacccctacctgaccctgaagccggagtttgaggcacgtcagatcgagatcttcggcgagatggccaagaagggctacatctacaagggtctgaagcccgtgtactggtgcccggactgccgcaccgcgctggcagaagccgagatcgagtacggcgaggacgactgcgattccatctttgtgcgtttccacgtctcgcaggatcccaacggtgtgctggcaaagtacggcatccccatggataagacctacttcgtcatctggaccaccactacctggaccctgcccgccaacgaggctatctgcctgaacggtcagttcgagtactccttcgtcaagatcggcgaggagtaccacatcatggccaccgatctggtcaagagcgtcatggacgcctgccacatcgagaactatgagatcgtgggcgagcccgtttccggcgctgagttcgagctgatgcgctataaccacgtctacctgcccaaggagggctgggtcattctgggcgaccacgtcacgctggaaagcggttccggctgcgttcataccgcaggcggtcacggcgtggacgacttcaacgtctgccaaaagtatccgcaggtgcccatcacggtgcccgtggatgacggcggttatctgaccgagctggccggcaagtacgctggtcagcgcgtgtgggcagccaacaagaccattctggccgacctgactgcttccggcgctgtgatgggtcaggtgcacatcaagcaccagtacccccactgctggcgctgccatcatcccatcatcttccgcgctaccgagcagtggttctgctccattgccaagttccgcgaggacgtgtacaaggcaattgataccgtcacctggatgccggattggggccatgaccgcatgaccggcatggtgcgcgaccgtaacgactggtgcatcagccgccagcgcacttggggcgtgcctatccccgccttctactgcaagaagtgcggcacctaccacatcaccgatgctaccatcaaggctgtcagcgccctgttccgcaaggaaggctctgacgcatggtataagtacgatgccgagcagatcatccccgcaggcgaagtgtgcgagaagtgcggcgcttccgagtgggagaaggattccgacatcatggacgtctggttcgactccggctccacccatgctgccgtgctggacgagcgtcccgagctgcatttccccgccgatatgtatatggaaggcggcgaccagttccgcggctggttccagtccagcctgctgaccagcgttgcaagcaagggctgcgcaccctataagtccgtgctgtgccacggctgggttgtggacgagcagggcaagcagatgcacaagagcgccggcaacggcgtggagcccagcgagatcatcaaggactacggcgcagacatcatccgtctgtgggtggcttcttccgactacaccgtggacgtgcgcgccggtaagaacatcttcaagcagctcagcgaggcttaccgcaagatccgcaacaccgcccgcttcattctgggcaatctggacggctttgaccccaacaccgattgtgtggcagacgaccagctgcaggatatcgaccgctgggcactggctgcgctggatgacctgatcgtcaacaccaacgctggctacgctgtgtacgacttcaacaaggtctaccacgctgtgtacaacttctgcgtggtggccatgtccaacttctatctggacgtcaccaaggatcgtctgtactgcaccaacggcaccgcccgcaaggccgcccagaccactatgtacaagatccttgttgctctggacaagatcattgcccccatcctgtgcttcaccagtcaggagatctgggacttcatgcccaagaccgagggcatgaacaagtatgtggtgttcgagcagatgcccaaggccggccagtatgccgccgacgatgcctttaaggcaaagtgggcacagctcatcgccgtgcgcgacgaggtcaagaaggtgctggagcaggcccgtgccgaaaagctcattggtgcttctctggaggcctccgtcaccctgtactgcagcgatgccgtctatgacctgctgaacagcatccccatggacgagctggccgacctgatgatcgtctcccatgtggaactggtcaagggcgagggcggcgctgccagcgctgtcgagggcttgggcgttgcagctgcacacgccaccggcgacaagtgcgagcgctgctggaagtactctgcttccatcggtagccaccccgcacaccccaccctgtgcgcacgctgcgccagcgttgtggaagcataagcgtcccgcatcaatacaaatctgttttgtaaaaagggcggcgctcccttgaacggggagcgccgttttttataacagaaacgaggtagctaatggcatttgtactcttcaatctggcagctgtggctgcgctgatcggcatcgaccagctgatcaaactgtgggcagtgcaggttttgcagccggtaggcgctatgccgctcatcccccgtgtggtggaactgcggttcgtgctcaatccgggcatggccttcagcctgctcagcggcaaacagctgttccttatcatcgccaccagcgtggcgctgctggcggtggcctacggcctgtttttccgcagccgcggcaagcgcttgcagcaggcagcgctggtgctggtgctgggcggaggtatcggcaatctgatcgaccgtgtgctcaacggcgaggtggtggactacatcaacctgctgttcatgcgctttgctgtgttcaattttgcagatatctgcgtttgcgtgggcgtggcactgtgggtgctggtgatctttctggacgaagtgcacgccgatgacgccgcttccaaggagcagtaaattatggaacagcgtgaatttatcgtagagcaggagactgccggtcggcgtatcgaccgctttctcagcggcgaggacaccggcctgtcccgctcggcgctgcaggcgctggtggccgaggggcatgtgcagtgtaacggcaaggccgtggccaaaagcctgaaactcaaggcaggggacaccgtgctgctggagatcccggacgcaaagcccatcgaggccgtgccgcaggatattccgctggagatcgtctacgaggacgcccatctgctggtggtcaacaagcccaagggcatggtggtgcaccccgcacccggcaacccggacggcacgctggtcaacgccctgctgtggcactgcaagggcagcctttccggcattggcggtgagatccgccccggcatcgtccaccgcatcgataaggacaccagcggcctgctggtggtggcaaaggacgacgccacccacatcggcctttcccagcagatggcagtgcacagcgtggagcgcgcctaccagacggtagtttacggcggctttgcgcaggacgagggctttgtggaagcaaacctcggccgcagcaagatcgaccgcaaaaaaatggcggtctacccggcaaatgagccccacaccaagtatgcctacaccggctataaggtgctggagcggctgggggagttcaccctgctggaatgtcgcctaaagaccggccgcacccatcagatccgtgtacacatggcctccattcaccacccggtggcaggggacccggtgtacggcccccacaactgcatcaccagcctgcacgggcagtgtctgcacgccaaaacgctgggttttgtccaccccatcaccggggagcagctgcggtttgattccgagctgccggactactttacccattttctcgcaacactcaggaggaaaaacacatgaacgattctctggcatccactctggtgctctgtgatctggataacctgctgctgggcgaggatggcaatctgacccaggtggtgcgggacgttttgcagctgttcagcagccgcggcggcagactgaccgttttttcgcagcgctctccgcgcgcggtacgctctattctgggcagcgtgcgtctggctgcgcctgcgctggtgtgcggcggcaccatggcctaccactatgccgacggcaaccgggtgcctctgtgcagctttgcccagcagcaggagctttttgcctgcctgccggatacccccggtgtgggcgttgccgtgcagatgcaggacggcaccacccgggtgctgcgcatgagcaatgcactggagcgccatctgcggcaggagtggactccgtatctgctggcgaacgccgccgatatccaccccgagcaggtgctgcgggtgttgctgtatcaggacagcaagtctgtgcccctgatctcgctggcagaaaaggccatcggggatcgtgttgccctgctgggtgagcgcattgccccggacacccttgtcctcacccccaagcggatctccggacgggaaatgctggacaccgtctgcaccatggcgcaggtgggtgcagagcaggttctggcgctggcgggcggtcagcccatgctggaactggtgcaggctgtggagcacagcgccgtggctgccgatgccccggcagaactgcgccttgccgccgggcaggtcaccctgacggatgccgccggtggcgctgccgtggaggttttgtaccgcatggtgcgtgccgctgaaaaatctgtgtaaaacttatgcaaggtcctctgcaatttttctgcagagggctttctttttagcaaaaaatcaggtagaatgggagaagaagcctatgcaaaacaaaaaacgccgcgaggagctgttcctgctgctgtgtcttgccgccgcaggggtctgtgctgtgctggcgttccggtttgcagtgccgctgcaagcgcaaacgccgcagacactgccggacacaaaggagctggcagcgtatacgcaggtggaactgaacacagccgatgcagacgctttgtgcaccctgcccggtgtcggcccccacaatgcacaggccattctggactaccgggcgcagcacggcccgtttgcacaggtggaggatgcggcacaggtgccgggcattacccaagcaatggtggattcatgggcagggcaggcgtatgtccgctagggtgtagcccgcttgctgccttggtcaaagaggaaatacggagatttattgttatgagtgacgaatcgatctttatcaaccgcgaactgagctggctggatttcaaccgccgcgttctggcgctgggcaaggacaagaatgtcccgctgggcgagcggatcaagtttctggcaatttacggctccaatctggacgagtttttcatggtgcgcgtgggctccttgcaggagcgcgcaaaccttgagcagagcaagaccaaaaaggaaaagcgggaaaacaagaccaacatgactgccgccgagcagcttgccgccattatgcccaaaacggcgcagctgcaagaagaatgcgataaattctacgcaaaagcgctggaaaatttggcagagaacgcctaccataaggtggatttcgaccacctgaccaaggaggaagagcatctctggaaaaaatacttccagtccgagctattccccatcctcagcccgcagatcgtggataaccgccacccgttcccgtttttgcgcaacaaggagatctatcttggcgtgctgctcaaggaaaagcacacgcaggagcagagccttggcatcgtgcccatctccagccagatggagcggctgcacttcatcaaaaaggacggcgctgtgcagtttgccctcactgaggagctggtactgcactatgcgtccagcatcttcggcaaggattctattcaggaaaaatgcctgttccgggtcacccgcaacgcagatatcgacgtaaaagagggcatgatggatcacgatatcgattaccgtgagatcatgaccgagctgctccggcgccgccgcaagctggccgctgtccgtttgcagatcactcccgcccccgcaccggaggtggagcggctgctgtgcagccgtctggaactgacccgcaagcgggtgttcttgcaaaagagcccgctggatctgagcttcttcttcaagctttccggccgcatggaggccgagggtcacccggcactgttctacacccccgcgcgccccatgctgccgccgccggattatgatctggctgccgaggtacagaagcatgacgtgctgctcagctacccgtaccagtccatccgcccctttatcgccatgctcaaaaaggccgcacaggacccggacgtcatctccatcaagatgaccctctaccgcatggcgcgggagtcccagatcgtgcaggcgctgatggaagcagccgaaaacggcaaggaagtggtggcgctggtagagctgcgcgcccgctttgacgagcagaacaacatcgactggtccaagcagctggaaagcgccggctgtaccgtcatctacggcttcgaggactacaaggtgcactccaaactgaccctcatcacccgcaagggcgcagagggttactcctacatcacccagatcggtaccggcaactacaacgaaaaaaccagcgaactgtatacggattattccttcatcaccgcagacgagcgcattggtgaggaagcctccaaggtgttccgcaatctggccgtgcagcagctcaccgaggaaagcgacaagatgctggtggccccgctgcgcttcaaaagcgtgctgctggacgagatggatcacgttatcgctgccgcccgcatgggtcgcccggcttccatgatcctgaaaaacaactccatcagcgaccgggacatcatcctcaaattgcaggaagccagctgtgccggggtgcgtatcgatatgatcgtgcgcggcatctgctgcgtgcgcgcagaggtgcccggcaagaccgagaacttgcacatccgcagtctggtgggacggtatctggagcatggtcgcatttatagcttcttcgatggcacccacactcgcatttatattgcctccggcgacttcctcacccgcaataccgagtgccgcgtagaggtgggcgtgcgggtggaggatcccgctctggtgcaaaaactcacggatatccttcagctgcagctgcgggataatgtcaacgctagggtcatggatgccagcggcaactaccagaaggtaaagcccgccgagggcgagccgttggtcaacagtcagatgggcatgtacgagctgctgcgcaacgactggcagcgccccgagccgtggaagtgcaccacccctgccccggaagcagaaaaaccggcggcagtctgtcaggaagttaccgtggagcagctgaagcaggagctgccccatgtgttccagcctgcaccggaaaaggccgagaaggccgccccggcggcacagcagcccgaccactacgaggcgctggagcagatgctgaacaataagccccgcgctgcgcaacccgcccccaaagctccggctgcaccccgcccggctgtaaagcctgttgtcaccgcacccaagaaaaagagcctgctggaacgcatcgggagctttttccggcgctgatctgtaaaatcatataaacaaaagccagagctgctgcgcagaaatttgtgcggcggctctgttttttttgtttatgttctcccgcccgttgcttgtgcatacacttttcgggataggagggcggtgtatgcgggcaaaacggagcggacaggcagcaaaaatacgcagacggcggtggggcgttgtggcgctggtgctggcagggctggcactctgcctgctggctgcactaccggtgcaggccgcgcggaatacgaaaaagtactgttttccgctggatactgcggtgtggcgcatctcggatgtctatggcaagcggatcgacccctttaccggcaaagctgcgtttcatcaggggctcgaccttgcctgtgcggcgggtacagcggtgcgggcagtgcaggatggtgtggtgactgcggcggcatacagcccaagctacggcaaccatctgcgcatcctgcacccggatggctgcgagacccgctacgcgcacctgcaatacctctatgtccgcccgggagaggtggtacaggccgggcagacgctgggcacagtggggcagacagggcgcgccaccggtgcgcacctgcatctggaactgtggcagcagggcgctgcctgcgaccccgccgccctgctggagaccgctccatgaaccgggtgcgggcagggaagcttatattccgggacccggtactgctgtgcggtatggtgtacctgttgctgtattttgatgccagtggttttctgcgtctggggctgctggcggctgttttgcacgaactggggcacatcctcgtctactgcatccagcaaaggcatttgccggtcattgaggtgaccatgaccggcttttgtatgcgcacggcaggggagaggctgtccccgcgccagcggttcgtgcttgccgtcgccgggcctgcggtcaattttgcccttgccggggtatgggcggtgcgtcttgcgcaagctgctaccatccgcggcagcgcgttctgggcggcaaatctgctgacggggctgttcaaccttttgccaatcccgccgctggatggtgcacagatggcggcgtatgcaggggcgctctggcggcaaaaatacggaaagtgcacacaacccgccggaaacgattgcaaaaccggcacatttggggtaaaataaaaagaacgcaaaaaacggattgtttatggaggacccgatgtttgatcccaaactgaaagaagcgctgggacgggtgcagaagcccggccgctataccggcggcgagcccggcagtatctataaagaaaaggacaaggtggatgtgcgctttgccttctgcttcccggatacctacgaggtgggaatgtcctttctgggcgaaaagatcctgtacgagctgctcaacagccacgaaaactggtggtgtgagcgcgcctttatgccctggctggatatgaaggcagagatggagcgcctgcagctgccgctgtacaccatggagagcaaggaccctctcacggcctttgatgctgtgggctttactttgcagtacgagctttcctataccaatatccttgccatgctggacttggcaggtatcccgttctacgccaaagaccgtgatgaccgctggccgctgatcgttgcgggcggcccctgcgcctgcaacgcggagcctattgcggatttctttgatgtcatccagctgggtgagggcgaaaaccagctgcccgccatctgcgccgagatcgaaaaggccaaaaaagagggcatctccaaaaagcagctgctgctcaacattgcaaagatcccgggcgtgtacatcccggctttctacgatgtcacctaccacgaggatggcagagtgaaggccatcacccccaacgagccgggcatccccgcacgcatcaccaaagccatcatcaaggatctgaaccagtttgccccgcccacaaactttgtggtgcccatggtgggcgccattcaggaccgcgccagcatcgaggtgctgcgcggctgtgtgcgcggctgccggttttgtcaggcaggcttcttgtaccgccccatgcgccagcgcgatgccagtttgctgaacaaggcagcacaggatctgtgtgcaaacaccggctacgaagaactgagcctttccagcctttccacctctgaccacggtcagctggaagagctgctggacgatctgaacgagtgggcacccaaggagcacgtcagcctgtcgctgccctccctgcgtgtggacaacttctcccagagcctcattgaaaagaccaccaaggtgcgcaagagcggcctgacctttgctgccgaggccggtacccagcgtctgcgcaacgtcatcaacaaaaacgtcacctgggacgagatcgaaaagacctgtaccatcgctttcaatgcaggctacacctcggtcaagctctacttcatgatgggcctgcccaccgagaccatggaggatatcgagggtattgccgagaccgcccaaagggtggtagacctctattacaagaacacgaaccacgccaagggacgcggcgtgcaggtgaccattagctgcgcctgctttgtgcccaagccccacacccccttccagttcgtgcccatggataccgccgagaccctgcaggccaagcagaagcacctgttggaaagcgtgcacagccgcaagatcaaggtgaactaccacgacagcaccaccagcttcctcgagggcgtgttcgccaagggcgaccgccgccttgccccggtcatcgtggaggcttataagcgcggctgctacttcgacggctgggaagagtgcttcaagtacgatacctggatgcagacctttgcagacctgggcatcgaccccgccttctactgccagcgccccatcgcgctggacgaggtgaccccgtggtctcacatggactacggcatcacccacgagtatctggtgcgggagtacaacaaggctctggccgcccagaccaccccgccctgcaaccgtgcctgcaacgcctgcggtgccaaccatctgttaggaggtccctgctttgattacagtcagaatctcgtttgaaaagaaaaatgaagcctcctatatctccctgctggacctgcagcgggtgatgcagcgggtgctcaagcgcagcggtctgccggtgtggcatacgctgggtttcaacccccatatctacatgacctttgcctgcccgctctcgctgggacaggagagcgagtgcgagtgcgtggacgttaagaccgaggcggaagccccggattttgcccagtggcggaccgccctcaacgccattatgcccgccggtatccatgttacccgggtggctccggtggaaatgaaggcggacagcatcgcctttgcctgctaccgcatcagctacccggcggctgccgctgcggtgctggagcagtataatgcgctggagacagcccccgtggaaaagcacagcaagcgcggcaaaaagatcgtgaaccttaaagagcatatcccgcagcttagctatactgtactgggagacaccgtgcagctggaactgtgcctgcccgctgcgcaggagctgaacctgaacccctcgctgctcaccggttttctggaagaaaagttcggcctgcccgccgcaagtgccaacattctgcgcaccaagtttttgacggcagaccggcagctgtttgtctaaagctgcgcaaaagtccgtctatcaggcaaaacagaaaatttttgcaagatttttcgctaaattgcttgcattcaagccggttttgtgctatcctattagggcgttagtgtccgctgagaccacagcggggttaatgacaagtatttatcattaaacgggcggtcctctgacggctatgccgtgcatgaacgtctaaaaacaaatggaggattcaaaaatggacgcactgaagattatttctgaaggcagcatcaaggctgaaaagcctcagttcaacgttggcgataccgtccgcgttgatgttcgtatcaaggacggcgaccgtgagcgcattcaggccttcgagggcactgtcatcgctaagaagcacggcggcgttgcagagaccttcaccgttcgccgcgtggcttacggtgtcggcatcgagcgtgtcttccccgtcaacagccccttcgttgagaaggtcactgttgtccgcaagggcaaggtccgccgcgcaaagctgttctatctgcgtggccgtacgggcaaggctgccaaggtcaagagcgatatttgatcatccccgatttgaaaccgggagaaaagggacaacttgttgtcccttttttctttttcaaagcccgggtgtatcataaaatcaagaaaggctggtggcaaagctatggaaaaacagcagcagtctccctccgctgtacgcgggcagggcatgctggaatggtacgaagcgcttatctccgcagcgctggtgctggtactgatcttttcgtttttcttccgcatcattcaggtggatggacgctctatggtgcccaccctgacccacggcgataagcttatcgtctgggcggcaggctacaccccacagcggggcgatgtggtcatcgtggacagctacaccgtctacggtaagccgctggtcaagcggatcattgccaagggcggcgacaccatcagcattgattacgatgccggtacggtcacggtgaacggcgaacttttgcaggaggactacattgcagcccctacctatctgggctacgatgtgcagttcccgttcacagtgccggagggcaccctgtttgtgatgggggataaccgcaatgaatcgctggacagccgctcctcctatgtcggctgcattgacgagcgtgatattctgggcaaggtactgttgtgctttatgccctttacagattttggggtggtaaaatgaacgaaatggatacccggtttgcaaaccagtacaatattcagtggttcccgggccacatgaccaagaccctgcgtatgatggagcaggagatccagcatgttgatgccagccttgtgctgctggatgcgcgcatcccgctttccagcctgaacccggagatcgagcgcatcaccgaccgcaagcccaagctctatgcgctgaacaaagccgaccttgccgacccggctgtgaccgaggagtggatccgctacttccacgccgcagatgccggctgcgtggccatcagcgccaagcagaagggcggcgcaaacgccgtgaaggtggccattgaaaaggagctttccggtctgctggagcgccgccagaaccgcggcatgggcggtgccaaaacgcaggtaatgctgtgcggcatccccaacgtgggaaaatccacctttatcaacacctttgcaggctctgcccgtgccaaggcggcagaccgccccggcgtgaccaagggcaagcagtgggtcagcaccgaaaagtttgacctgctggatatgcccggcgtgctgtggaaaaagttcgattccaagaccattgcctccaatctggccttcatcggctccatcaaggacgatattctggacgtagaagagctggccatgaacctgctggacgaggtgcgccgcaactatcccgaccttgtggcacagcgctacaagctggatgccgaaacgctggcactgccgccctatgagctgctggaggccatcggccgcaagcgcgggctgctggtgcgcggcggcgaggtgaataccgagcgctgcgccatcatgctggtggacgagttccgcgcctgcaagtggggccgcatctctttggaacgcccgccgcagcgggatgatttggccgactttgccgaggaggacgaggaatgaaacgccactcggacgaggaaatctccgctccgctgtatgcctttgatgccgaggtgcgcagccagtacggctgctttgccggtgtagatgaggccgggcgcggcccgctttgcggccctgtgtgcgtagcagcctgtattctggacccggaaaacccggtgtatggcatcaacgattccaaaaagctgaccgaaaaaaagcgcgaggcgctgtttgacgagatctgcgaaaaagcgctggcctaccgcatcatctttgtggggccggaggtcatcgaccgggaaaatatcctgaacgccaccatgggcgggatgcagcaggcggtggaagagctggacatcgtgcccaatctggtgctggtggatggcaaccgtacccccgcaggcttgcagatcccggcacagccggtggtcaagggcgatgccaccagcgccagcatcggcgcggcctcggtgctggccaaggtcagtcgtgaccgctatatgctggagctggacaagcagtatccgcagtatcagctggcaaagcacaagggctaccccacaaagctgcattacgagctgatcgcgcagtacggcatccagctgttctaccgccgcagcttccttaaaaagcagggctactggccggagagcggcaaatgaaccgcgccgagaccggccgcaggggagaagctgtcgctgcccgctggtatcagaagcagggcgcgcagctgctggcgcataactatcatacccgcatgggagagctggatcttgtgctgcgggagccggatggcaccatcgtcatctgtgaggtaaagacccgcagccaagggatgctgcagcgccccgctgccgccgtagacccggccaagcagcacaggctgatctgcgctgcacaaaggtatttgcagcagactggcaaaagcgaagaaccggtgcgttttgacgttgcagaggtagttcctcttgacagcgggcgctggatggtacatattataaagggtgcctttctctgcgagacctaaggcaggaaccgtggcaccggtgggaagtatgcggcaaaacgagggttttgccgtaaaaccgggaacgtgcccggcacgttccgtggcgaaaaggagcgatgaccatgcagtttttcagtaccagagatcagaaccgcaaagtaacttcttctcaggcaattgcacaggggctgtccgatgagggcggtctgtttgtgccggaaagttttccgcaggtggatgtaaaagccctgtgcgggctggattaccccgcgctggcagccgccgttgtgcgggagtacctgaccgattacgaccccgccttcctgaccgaggccacccgcagcacctacggggctgcttttggcggcaaggcaggctatcttgccccggtggaaggggacacctatgccctggagctgtggcacggcccgacctgcgcctttaaggattacgccctgcagctgatgcccaagctgctggtggaggccaaaaagaatctgggtcgcactgaaaagaccctgatccttgtggccaccagcggcgacactggcaaggctgcgctggacggctaccatgatatccccggtgtggagatcgccgtgttctaccccaccggcggcaccagcgagatccagcgtttgcagatggcaacgcaggagggcgctaatgtggcggtatacgctgtgcgcggcaacttcgacgatgcccagaccggcgtaaagaaggtgttcggcgataaggccattgctgccgaactggaaaagcgcaacatccgtctttccagcgccaactccatcaactggggccgtcttgtgccgcagatcgtctactactttgccgcctacgcccagctgctcaatgccggcaagatcaccttcggtgacgaggtggacttctgcgtgcccaccggcaacttcggcgatatcctcgccggttattacgcaaagcagatgggtctgcctgtgggcaagctggtctgcgcttccaacgagaacaacgtgctgaccgatttcctcaccaccggtacttacactgcaaagcgggagttcttcaagaccacctcgcccagcatggacattctggtgtcctccaatctggagcgcctgctgtaccatgtgaccggcagcgatgccgaggtggcgggctttatgcagcagctggctgcaaccggcagctataccgtccgtcccgagacgctggcagctattcaggagaccttctcctgcggctggagcagcgaggccgaggtggcaggggagatccgttcccgctacgaaaaggacggctacctgtgcgatacccacaccgccgtggccttccatgtggctgcacagaaaaagcggcagggcgtgcccatggtggtgctttccaccgcatcgcccttcaagttcccccgcagtgtgctgagcgcactgggcaaagctgccccggaaaacgattctgaagccatgcagcagctggaagctgctaccggtcacgctgcaccggcaagccttgccgccctgcgcagcaagccggagcgctttgataccgtcattgccccggcacagatcgctgaggtggcgctgggctatcaggcataagcttctgcggacagacagaacaggagtaaacagactatggcactttttgtgcttggcgacccccatctttctctgggcgcatccaagccgatggacatctttcccggctggaacgattatgtggacaggctggagaaaaactggcgcaagctcatcaccccgcaggacaccatcgtgctggcgggggatatcagctgggccatgcgcctgaccgatacccgcaaggatttcgcctttttgcagcagctgcccggacagaagatcatcatgaagggcaaccacgattactggtggtccaccgccaacaagatgaacgcctacctcaaggccgagggcttcgataccctgcatatcctgcataacaattcttacagcgtggaagggtacgccatctgcggcacccgtggctggctgttcgatgtgggggaaccccatgatgaaaaggtgatgaaccgcgagatcggccgcctgcgcatgagtttgcaggctgcggagcccgggctggaaaagctggtgttcctgcactatccgccggtctacaccggcaccagcgccccggagatcgtggccaccctgaaggagttcggcatcaagacctgcttctacgggcatctgcacggcaacgccatccggttcgccgtacagggcgaggtggacggcatccggtacaagctggtaagtgccgacggcctgcgtttctgcccctaccgcatcaattaacggcggtataaaagggcaaaaatgacaaaatttaaaaatttggtatggcaattgtgtccagagcgtgctataataagttttgacgcgattgttgcacccaattgagcgcgcgcgtccccgcattccgtgtgcatacagcaaggacgtggtgcgcggttgccccgggcaaaaacttcctgccctgagcaatagaatatttgagtggaggataaacaaatgaatctcatcaagtgtgaaaagctcgagaagagcatggcagaactgcagttctccatcgatgcagaggccttcaagaaggctgttgccgatgttttcaaaaaagagggcaagaagtaccctgtgcagggcttccgcaagggcaaggctcccaaggctctgatcgagaagatgtacggcgcagacgtctttacctacgacgccatcaacgagctgttcccggaggcttttgaggctgccgctaaggaagccggtgtggagcccgtgggccgtcctgaggtcagcgtggattctgccagcgaggcagagggcgctaccctgaccgtgaaggtcgccgtgaagcccgaggtcaaggttggcagctacaacggtctgaccgtggaaaagactgtccatactgttaccgacgaggctgtggacgctgagctgaagcgtgtgcaggagcgcaacgcccgtgagctgacccgtgagggcgctgctcagaatggcgatatcgctgatatcgacttcgagggctttgtggacggtgttgcattcgagggcggcaaggctgagcactacaacctgactctgggcagcggcagcttcatccccggcttcgaggagcaggtcgttggtcactctgccggcgaggagttcgacgtgaacgtcaccttccccaccgagtatcaggctgccgagctggctggcaaggctgctgtcttcaagatcaagctgcacgaggtcaagtacaaggagctgcccgctctggatgacgagctggcaaaggactgctccgagtacgacactctggacgagttcaaggcttccatccgcaagaacaaccaggagcagctggacaagcaggacgatctggctgtcgagaatgctctggtcgatcaggtcatcgagagcatggagggcgagatccctcaggctatgtacgatgtccgcatggacgagatggtcaacgactttgctttccgtgtggagcagcagggtctgcgtctggaggactatctgaagtatatgggtcagtccatggagcagttccgcgccgctttcatgccgcaggctgagaagcaggtcaagatcggtctggctctggaggctgttgctgctgctgagcacatcgaggcttccgaggacgagatcaatgccgagatcaagcgcattgctgaccagtacaagatggaagaggacaaggtgcgtgagctgatcaacctcgaggatctgaagcaggatctggctcgcaccaaggccatcgacttcatcaagagccacgccaatatcgtggagaagcccgcagaggctgagaaggctgctgacgctgagtaatcagtgccgggccctgtaaagcgccgcaggcgttttatcaaaggttgttaaaattgaccggtacggctgaactttacaggggacccgtatcggtcaattttgccaataaacttaaaccattttcaggaggcgaactttatgagttttgttccttacgttgtcgagcagtcggcgcacggagagcgttcttacgatattttctctcgtctgctgaacgatcgcatcatcgtgctgagcgaggatgtcaacgataccaccgcaagccttgtggtggcgcagctgctgtatctggaagggcaggacccggataaggacatcagcctgtatatcaacagccccggcggctccatcagtgccggtatggccatccatgacaccatgcagtatatcaagtgcgatgtttccaccatctgcatgggcatggctgcctctatgggcgcatttctgctggcaagcggcaccaagggcaagcgctttgcgctgcccaacgccgagatcatgatccaccagccgctgatcggcggtcagggcggcggcctttccggccagaccacggatatcaagatccatgccgagcacatggtctatatccgcgataagatgaaccggatgctcagcgagtacaccggccagccgctggaaaagatccagcaggacaccgagcgcgacaactaccttaccgcgcagcaggcaaaggaatacggcctgatcgatgaggtcattgcccatcggtaaaccgctataatctatccaggataaggaaaaacagctatggcaaataacaattccggcaaaaacgaaaaggatctggtttgcagcttttgcggcaagcatcaggacgaagtggagcgcatgatcattggccccggggtcaatatctgcagcgagtgcatcggcctgtgccacgatctgctctctgacaagccggatcagcccaaaagcgcccgtccggctcgcggcagcgcaagccgcgcccatgtccagcccgctgctgcagatctggatatcaacatcatgaccccggccgagatcaaggaaggcctggatcagtatgtcatcggtcaggacgaggcaaagcgtgtgctgtccgtttcggtctacaaccactataagcgtatcctcagcggcaagggcggcgatgtggagctgcaaaagtccaacgtgctgctgctgggtccctccggcgtgggcaagaccctgctggcccagacgctggccaagatgctgggcgtgcccttcgccattgcggatgccaccacccttaccgaggccggttatgtgggcgaggacgtggagaacattctgctcaagctgatccaggcggcagattttgatgtgcagaaggcacagatcggcatcatctacattgatgagatcgacaagatcacccgcaagagcgaaaacccctccatcacccgcgatgtgggcggcgagggcgtacagcaggcactgctgaagatcttggagggtactgtcagcaacgtgccgccgcagggcggccgcaagcacccgcagcaggagttcatccagatcgacaccaccaacatcctgttcatctgcggcggtgcctttgacggtctggacaagtatatcctgcgccgcaccgataagtccgcgctgggcttcggcagtgcgctgaaggataactccaccgaggctgagcgtgcattgctgcgcaaggtagagccccacgatctggtcaagttcggcctgatcccggagctgatcggccgtctgccggtcatcaccgtgctggacgatctggacgaggatgcactggtgcgcgtgctcaaggagccccgcaacagtctggtcaagcagtataaagagctgctgggcatggataacgtggagcttaccttcacggacgaagctttgcacgccattgcccgcaagaccatcgagcgcaagaccggtgcccgtggtctgcgcagcgtgatggaaagcattctgctgcccattatgtacgaggtacccagcgatgccaccattatccgcgtgaccgtggacgaggacaccgtggagggcggtgaggcacatctggaatacggtgccgtgcgcaaacgctataaaaatcaggccgctctcagctgacggcatcgccgcacagcaggggagtgtacctgcctaaaagccctgtttcgaaagctttttgcttttggcagggctttttgctttcaaattcttgtttctgacaggaaaatgtactataatagcaaagtatggatcgtgcggcgtgtgttctctggcaggggcataccgcaaaagacgagccatagtattgggtaacaggaagagtactataaaggagtgtgttttcaatggcaaattaccacgagatggatcgcgatgcgctgaccgctgaaaaggcagcgctggaacaggcttataaagagtttcaggcaaagggtctgaagctgaacatggcacgcggcaagcccggcccccaccagatggatctggcaatggacctgttgaagatgaccgactacaccacggatgcaggcaccgacgcccgcaactacggcgagctggagggtctgagcgaggcacgcgccctgtttgcagatgtgttcggcgtaaagcccaacgaggtattcgtgggcggcaactccagcctgcagctgatgtataacctcatcaacatcggctatgtgttcggcttcccggagtctccctgcccttggtctcaggtggaaaagcgcaagttcctctgcccggtgcccggctatgaccgtcactttgctatcaccgaggagttcggctttgagctcatcagcgtgcccatgacccccaacggccccgatatggacgttgtggaaaagctggtagcagaggatgataccatcaagggcatctggtgcgtgccgcagtactccaaccccgatggctacacttacagtgatgagaccatcgagcgctttgccaagatgaagaccgccgccccggatttcaagatcttctgggatgaggcctacatcgtccaccacttgaccgaggagatcattgagacccccgtgctgctgaacgtgagcaagaagtacggcacgcaggaccgcgtgttcatgttcacctccaccagcaagatcaccttcccgggtgccggtgtttctgccattgcctgcagcgacaacagcatgaagtatatgtgcaagcgcttttcagtgatgatcatcagctacgataagatgaaccagctgcgccacgtccgcttcctgaagaacaaggagggcgttctggcacacatggcaaagcaccgccgccgtctggtgccctgcttcgatgccgtcaagaccgcttttgccgccaacctcaccccctgcggcgatattgcccactggaccaaccccaagggcggctactttatcagcctgtatgtcatgcccggctgcgctaagcgcgtggcggaactgtgcaagaacgcaggtctggtgctgaccggtgcaggctctgcttacccgtaccacaaggatccgcaggattctcatctgcgcatcgcccccacttaccccagtctggacgaggtggagaccgcttccgaattgctgtgcgtctgcgtgcgtctggctgttgtggaaaagctgctggctgatatggcttaaggcttaaaataatttgtatattctcctctgcggggctctttgcagggctggcaggggagttttatcacagaaaggtcggcacgacggctgctctgtgaggagaggaaccgtcggcaaaacttgcggttcacaacaaaaacggctgcggctgcacagccgccgcttttggaggttcccgacttatgaaaacaaaaggcaaagcatggcagctggtcgttaccgcgctgctgatcgttgtgtttgtttacaccgccttttttggcgtggcggcaaaatacggcgatgtgaccaccacctatatcaaaggtgcaaaggatatccgctttggtgtggatatcaaaggcggcgtcaacgtcacctttgtgccctcggatggctatgatgccacggacgagcagctggatgccgcccgtctggtcatcgagaaccgtctggtcgcgttgaacgtgaccgactacgagctgtatgtggacaacaactccgacagtctgattctggagtttccgtggcagtccggcgagacggattttgaccccgagtctgccattcaggagatcggcaccaccgcctacctgaccttccgcgagggagccagcaaggacggcgagctgattttggacggctccatggtcgaaagtgcttcggcacagtacggtgctgtgagcaacggcggcagctctgagtattacgttgccctcaagttcaccaccgagggtgccaaggcctttggcgatgccaccaccaagctggccgccgataagggcagcatcagcatctggctggacgatgaaaacgtaagcacggccaccgtcaacaccgccattaccgacggacaggccatcatcaccagctcggcgtccaatccctttacgcaggatgccgtggtcaagatggcacgccagatcaactccggcgcgctgccctttgccctgagcgtagacagctactccaccgtgagccccagtctgggcgaaaacagccttggtgccatggtgctggcaggcctgatcgcctttgccctcattgtggtgttcatgacggtgctgtaccgtctgccgggctttctggcctgcatcgcgttggccggtcaggtggcggctacgctggcctttgtgtccggctacttcccggtgtttgaaagctttaccctgaccttgcccggtattgcaggtattattctggccatcggcatgggcgtggatgccaacgttattaccgccgagcgcatcaaggaggagctgaaaaacggtaaatctctggacggcgcactgaaaagcggctttgcccgcggcctgacccctatcattgacggcaacgtgaccatcgtcatcgtggccatcgtgctcatgggcgccttcggcccctcggatggcctgtttgctaaggcgctgcattttgtattctttgccttcggcccctctaccgcaggcaccatctacgccttcggctatacgctgctcaccggcgtgctgctgaactttgtgttcggtgtgttcgctacccgtgttatgatccgcggcgcagccgccatcaaggcactgcgcaatccgtggctgtacggcgctgcaaagcccgggcaggagaaggccgaaaagaagccggtggatttcgtatccctgcgcaaaaagttcctgaccttctctgcctgcctgatggcagttatcctgctgtgcgccgcggtgttcggtgtgcatctggataccgagtttaccggcggtgctatgatcaccctgtcctacgagggcggctttgaccaagccgctgtgcaaaagaccgctgctgcggcgctggaaaacaccggcctgaccctgcagaccggcgagaatgtggccaccggcgaccagaccctgaagatctccatgcccggcaccgagaccgtgaccaccgagcaggtggagaacctgctggattccttgaatgagaactacccggacaaccagtttgcccagctgtctctgagcaacgtcagcgcagccatgggcaccaagttcctgcagaagagtctggtggctgtggtgtttgcactggtgctcattctgctgtatatcgccctgcgtttcaagaacatcggcggtctgaccggcggtatgatggcagtgctggcgctggtcaacgacctgatggtggtgtttggcacctttgtgctgctgcgcaccgcactggacggcaactttatcgccgccatgctcaccatcctcggctactccatcaacgataccgttgtggtgtacgaccgtatccgtgagaaccgcgctctcatgggcaaaaagggcagctttgaggagctggtcaaccagtcggtcaatcagtctgcccgccgtaccctgatcaccaccatcaccaccgtgatggcactgggtgtgatgtgcatcgtggcaaagctctacggtctggacagcatctttacctttgcattcccgctgatgatgggtatgatcagcggtgtgtacacctctctgtgcgtttccacctcggcatgggtgctgtggagcgaacgcagcaaaaagaaaaactgaggcggaggaacaagagatgaagtgcccttattgcggcgcggaggaatccaaggtgatcgactcccgccccacggaagataacgagcgcatccgccgccgccgcgagtgcctgaactgccacatgcgctttaccacctacgaggtagtggaaacggtgccgctggtggtcatcaaaaaggataactcccgcgaaccctttgaccggcagaagctgttcaacgccatgctgcgcgcctgtgccaagcgtcctgtcagctacgaaacgctggaacgtgctgtcagcagcattgagcaggctttgttcagctcctacgaccgcgagatccccagtgtgcgcatcggcgagctgaccatggaggaactgaaaaagatcgatgaggtggcctatatccgctttgcctcggtctaccgccagtttgcggacgtggaaagcttccttgacgaactgaaaaagcttgtgggcgaccgcaaggaaaatcagtaaactatcatgaaaaaaaggacactgcacgaaacactgtgcagtgtccttttttgctcatcttataccagccgccgggcaagccattccagccgctccacctccacctgtgcacggcgcaactcacccagcgcatcctctgtggcttgctgctcaaggtatccgtctgccgcccgcagtgcagcttccagctccgtgtagtcggccgtgcgcagcagatggctcatagtttcccgcatggtatcgcacagttctgcaccctcggcaagcgcctgccgcgcggtggggaagtccttctgccgtacggcctcaagggcacagtccaaatcggctgaaatatcctgtgcaaagccctgcacccgtccgctgctgtaaagggatactgccagcagcgccgccacaatcaggatacacgcatagatccgcttcatcgctttcctcccggctggcggccttccttcttcagcagaaaatagtcctcggtctcgttgccgataagcagtaagatctcctgtggcagcaccgtgtttgccgtggcggtgcgttccagccacgcacggtccttgccgcaccagcgcagattatcctccagtacctgcccgtccagcacaaaggggatggtggcctgtgtctgctgtactttcaactgtaaatcggagagggtggctgcttcctgctccgggcgcagcgccgccgacagtgtgccgtttgtttcaattacggcataggacaccttgcgcgggtcaaagatatccttgccgcgcagcgcctccatcaggtcggcggtggtcagccgcagcatccgcaaagcgttctggtcgatctttccgtccagaatgaccgttttgggacgcccggagagaaaattgaagaacttctggctgcggaaactcaccaccgaccccagcagctccagtgccgcaatgaggaacagcgggatgaggctggcggtgatggggacatcctccgattcaatggagatggacgccagattagagatcaggatggtggataccagctcctccggctgcagctctcccagctgacgcttgcccatcagccgcatggcaaacaaaacgcagagatacaaaataatagtgcggcaaagcagcagtttcatgcacaaaccctccatggtggtgtgcgcggcgtattccgctgcggcaaagcgggcatactgcacacacaaaggagtgatggatgtgcagcagctttcgcaaagccttgcggaaaacctgtccgcgcttgatgctaggtttggtcagtcggcggactattatgcgaagaagatcgttttgtatggctgcccagggtgcatcgtaatgtttgacggcatggcaagtctcgattcactctgggaactcttgctggacgccgccgggcggcagtctgcttctgtccggcttactggtacgcaagcttatgcgcatatcctgcacggctcggcgtttccggccgagagcactccggtgcaggatatgtcgcagctcgtagcgcggctgacggcgggcatggcggtgctgcttttagagggctgcagcagtggtattgttttttcagtgcaggggctcaaattccgctccgtggaagagccatccgccgagggcaatctgcgcggcagcagggaaggctttaccgaccttctgcgggtgaatctgagccttctgcgccgccttgtccgtaccgatacccttatgcaggaggccgcacaggcgcacacctgctgcaatacagagtatgctctttgctactgcaaggaccgtgccgaccccgccatggtgcgccgggtgcgcaccattttgcaaagcgcacggccggagctgctgctggattccagctattttgtaccgtggctgctgcccggcaaggcgcggctgtttaccccggtgcactacaccgagcgcccggcggtcgctgccgccaagctctgcgagggcaagctggtaattttagtcaacggcagcccctcggcgctggtgctgcccgctttgttcagcgagcagttcgagtgtctggacgactacgcttccacagcgatgttttcctcttttctgcgggtgctgaagtacttttctttctaccttacggtgtttttgccgggggtctttgtgtgcgtggcggtgcatctgccggagctgctgcccccgcagctgctgtataagatcgaagcagccgaaaaggccaccccgctgcccctgtttgccgagatgctgctggtgatcctactcttagagattatccgggaggccgggctgcggatgccgcagtcgctggggcactcggtcagtctggtgtcggcgctcatcattggcgatgccgccattgccaccgggcttatgagcaccccggtcatctttgtggccagcatcacggccattgcagtctttgtcaccccgggtctgtacgagcctgccaccctgctgcgcatcggcacggtgctgttggcagggcttgccggaccagtgggactggcagcagcgtttttcggctttttgctcagcctcgtcagcaccgaagcattgggtgtgccgtatcttgcgccgcaccccttcccgcagcagccgctttccgaggacggcgttctgcgccgcaactaccggcagctgtcccggcaggggttcaatatctggcaaaagcgggagagggggaaacggcggtcatgaagcagcaaacagaacgttttaccccggcggcgttgaccctcagtttggtaactgcagcgctggcagacggcatcccgcaaagcgttccggtgcgccgggcgctgtggctgggcgtggtcagcgcggtgtgcctgtgcatcctttcggcgctggcagtggcaatgttgcagaacaaagcgccctcccttgcggtgcggctggcactgacagctgggctttttatggaactgatgcacaccctcgtgcaggcacaagggctgtgcacggcagagttttcctccatggcgctgctgggctttctgccgctgctgctctgggcggggtgggctgtccctcctgcaagctggaacgcttcggcgcgggtgctgtggtggtttgccgctgtgggcggcgtggtctgcctgttggggcttgcagggcagctgcactggtaccggctgtttaccccggcacagccgactgcagcaaactgggacataccggtctacgctgaatattttgcaggagcccttctgtgcagtgcacggtctgcccgccgcacggtctggctgccggtatggggctttgcggtgcaggctgcggctttgctgggcagtgctttgctgtttggcagcgaaacctacccccggctggagttgctgcgggcgtggagtagcggcagcttttcccgcatggatgcgctgcttttgctgctgtggctgctgtgcgctgtctaccgggcagccatgctgtgtgccgctatccgcttgctctggcagcagccggaagccgaggtgcaaccatgagaaaacagaaatcttgcaaaccgatgctgtatttgcttctaacaggatggtgccttttattcctgcgctgcgaaagcaccgagaaaagcatggtgcgggcggtgtatctttcacagacagggcaggggtatcaggcagggctgctctatcaggcaccgcaggccgccgccgatgccgccgaagcctctgccgcgttacagtttgtgcaggcagaggggcaaacgatggaacaggcgctggctgcggcagagcaggcactgccccaaaccgcaagctaccgcctgtgtgattatctgctgctgccaaaagcggaagagccattactaacagagtacgagcagctggtgctgcggcgcggctgcggacgcacggcggcaaggctgctttgcgcagaaggagagacaggccaccttgccacacgggccgccctgccggatgctctgatggcacaaataaaggccgcagcacccaccgcaccccggctgtatcagcatacagagccggggcttctgcccattctccggtggaacgcggaagagataacgatacaggagggcggtgttctgcacaccgtagcgggcgatacgcccttgtcctcggagcaggccgaggtctaccggctgcttaccgggcagggcggcacccggcagctctggctggaaggggagcgcatcggcatccggcgctgcatcgtttcagtcaccttgcaaaaggcgcaggtgcttgtgcggctggactgtcaacgcgctgcccacagcccattgcccacgcaggcgcagcggcaacagcttgcggcgcagtgcaccgcacttttgcaaagctgctggcagcagggcgtggatgtgctgcacctgcaagcccgggcagcgctgcggagcggcagcggcgcaagctttgacccaacaaaaaacgcctgcccgcaatggcggacagacgtgcatttcatgctgtattaagaggcagtaggaaaggtgacggtaatggtggtgccaacgtccacctgactttccagtttgatgcgggcgttgtggatgcgggcaatgtgcttgacgatggcaagcccaagcccggtgccgccggtggccttgctgcggctcttgtccacccggtagaagcgctcgaacacgctggcctgagcttcccgcgggatgccgatgccgttgtcggccacggtcagggagcagtgtccgtcccggttgcaggtggtgatgatttgtaccttaccgcccgggcggttgtagcggatggcgttgtcgcacagattctggcacagttcatccagcagcgcgcggctgccaagcaccggggcgctctcgcccagataagtcagggagatataggcgcggcgggcgttcagtttctggcgctccacacactccttggcaacctccaaaaggtctaccgtttccattacgggggtgtccccggtctcgcttacagtgtccaacttggaaagctgcaaaatatcgttgaccagctggatcatgcgggtggcctcgctgtggatcttgcggccgaaatccggcacatcctccggctttgcaatgccggtctcaatcaactctgcatagccggaaatgctggtcagcggggtcttgagctcatggctgacattggcagtaaactcctgccgcattttctcgttgttttctcgcagaatgcggtcggagtggatgctctctgcaaaggggatcagttcccggtagggcacattttcctgaatgtgatccagatcctcagtcatgttcagcaccggctgtaccagtgctttggtcagcagggcggccagcaccgcagcagccagcatcagcgccacgcagctcagcacgatggccgggatagtggcatcatagatggaccacacggtctcggcgtcctgtgccacgcgcagcacatccccgccggaaagccggagcgcatagtaataggtctcgtagcccatggtctgggaatcgcgaatgtcccgaccctcgccgtttgcaatggcatcgcggatctccgggcgggtcagatggttctccatgggctggtcggtggcagattcaaacagcacgctgccgtcctgactgatcagcgtcacgcgcagatcatcggtcacaaaggcactcagctgtgtggggtctccggtctgctcgtacccggcgcgcacaaggtcggtctcgcgctccaaagccgaccatgcctgcgccgtaaaggccttatggaacacaaaaatgcacagcactgcggtgaatataagccccagaaagcccatcaggaacaaccggtagctgatcttttcttccatgctgcgcagcttcattcttcttcggcctcctcatcggtcagcttgtagcccaccttgcgcacagtgcagatgtaacgccccgcatcgcccagctttttgcgcagggtgcggatgtgcatatccacggtacggctttccaccgagatgtcggtgccccacactacctgcaaaatggtctcgcgggtcaccaccagactggtgttttccagcagcagacgcagcaggcagtattccttgtaggtcagctccacaggggtgctgtttaccgtaacgctgtggcgggcgttatccagctgaatttcatgaaaggccagcacgtccggtcttacctccggggcagagcgccgcagcgccacacgcacccggctgagaaattccataatgccgaaaggctttgcaatgtagtcatccgcgccgcagtccagcccgcgcacggtgtccagctcgctggattttgcagtgaccataatgattggcagcctacgcagggaaggggtgttgcgcagctttttcaggatggaaaagccgtcctcgccgggcagcatcacgtctaagatcaccagctccggctcggcagtgcgcatggcctgccagaagggctcggcgctttcaaagccctgcacctcgtagccgttggattgcagggcatactgctccagctcccggatagaagcatcgtcctctacgatatagatcataactcagttctcctcagcagtctgtccgtccgggaacagataccgctcacggtagcggcccagacggcggtggaattcttcactttccttggtgtcgttgccgtggcgcagatcgttcagataagcgtgggtatcaaagctgtcctgtgcaacctcgatctgcgcaactgccacgttgctgcaatggtcgcacacacgctcgtagttggtcagcagatcgtccagcacaaagccgtactcaatagagcagctgccggcctgcaggcgggcaacgtgtcgcgccttaatggcacgcaccagctcgttgaccacggcctccagcggctccaccttggaggcaaggtgcagatctcccttgcggaaagcatcggtggtgcggctcagggtgtcctgcaccgcatcctccagaacctgcagctcctcctgtgcatccttggagaagtgaatctccttctggtgcatctcctcggcagattccagcaggttgacggaatggtcgctgatacgctcaaaatcactgatggtgtgcagcagggtgttcacgctctggctgtcggtgtggttcagttcccggccggacagcttgaccagataagtgcccagtgcgtcctcgtaccggtccacccggcactcctcgtcccgcaccttctgggcaagttcgtcgttccattcgtgggtcaggctcatggcctgcaccacgcccacccgggcaagctcggccatttcagcggtagcggcgcgagcacgctccacagccacggcgggggtgttcagcagacggtcatccagcagcgcaaactcctctttttccggggaatcgggaatggtcaggatggccagcttttccagcccggtggcaaagggcagcagaatgacggtggccagaatgttgaacaccgagtgcacgattgcaatgccccaagcctcgatggtggtattcacaaaggcaaagtggcagacggcgttgagtccgtagaacccgaacagaaagatggtcacaccgataatgttgaagtacaggtgcaccatggcagcccggcgggcgttcttattcgcacccaccgaggacagcagtgcggtcacacaggtaccgatgttctgacccatgatgatggggatggcactgccgtaggtgatgacgccggtggcgctcagcgcctgcaggatgcccacgctggcgctggagctctggatgatgccggtgaccagtgcgcccaccagaacgcccagcagggggttggagaagcgggtgaacaggctggtgaaccatgcctcgttttgcaggggcagcaccgcgttggacatggtggtcatgccggtcatcagcacagcaaagccgatgaggatggtgcccacgccctttttcttctcactcttacacatatacagcaaaatgccgataaatgcaagcaccgggctaaaagaagtgggcttgagcagctggacgagcaggctgtcgccctgcaaaccggaaaggctcaaaatccagctggtcacggtagtgcccacgttgctgcccatgatcacgccaatggcctgatgcagctccatgatgccgctgttgacaaagcccaccaccataacggtggtagcgctggagctctggatcacggcggttacgcacagacccagaaaaaagcccttgaggggattatcggtcagcttgctgagaattttctgcagctgaccgccggcctgcttttccagtgccttgcccatgatgtccataccgaacaaaaacagggccagacctcccagcagcgaaaagacattaaaaatggtcataagtgttttcctcacttttcttgacgtgtttttctcctgtgctttaagtatagaaaaacaatgtaaaatctgaaatcgccgaaatgtaaaacccatgtaaagtaagaaaaatgtaaaaatcctgtgcacacgctgcgatgcagcgtcggtttcccgccgtgggtacaaaaacagcgccccgggcgttgtatttgccgccgaattttattataatatgaataagaatgcccgcagcacagcgcggcaaaaggatacaggaggaaccaggatgggtacgttcaatgtttcgcttaaaacgctgaccgaccgcgtcagcatggaagtggtatacaccccccgggcgctggatgagatcagcgtagagatcgccgaggtcaaccgcccgggtctgtttctggcgggctattatgattactttgataagcttcgcctgcagatcatgggtctggcagagatgaactttctgtccggtctgacggcagaaaagcgctacgaagcgctggagcagctgttccggcagcagcccccggcggtcatcgtctgccgcagcgaggagctggcgcccttcccggagatgcaggaactggcgcagaagcacgcggttgccctgctgcgttccaacgagactacctgcactttgatgggcagcctgatcagcgtactgaatctggagcttgcgccccgcatcacccggcacggcgtgctggtggaggtgtacggcgaaggcatcctgatccttggcgacagcggcatcggcaaaagcgagctggccattgagttggtcaagcgcggccaccgtctggtggcagatgatgccgtggagctgcgcaaggtgtccaaccgtcagatcatgggcactgccccggaaaatatccgccacttcatcgagctgcgcggcatcggcatcgtcaatgtggcccgcgtgtacggcgtaggcgctgtcaagctgagcgaaagtctggatctggtggtgcagctggaagcgtgggaccccaccaagaactaccagcgcaccggtctggaaagtgaatactacgacattctgggcgtcagcattcccagcaccagcatcccggtctctcccggccgtaatctggctgtggtgctggagactgcagccatcaataaccgccagaagaagatgggctacaacgcagccaaggagctgctgatccggctgggactggatgacaaaatggactgaaactctctataaaaaggagcctgaccctatggaacaactcaagcagctgctgaccgcagcaggcattgcttataaagaaaatgagccgctggcggcgcattgtacctttaaaatcggcggcccggcgcggctgttcgtgcaaccgacagaccgggcgcagctttgccgcaccgttgccttgtgcaaggcgcagggcgtccggtattatctgctgggcaatggcagtaatatcctgtttgccgacgaaggctacaacggcgcagtgctggatgtttcctccatgcaggacgctgtggaggtgcacggcacacagctcaccgccggggcgggcgtgcggctctcggcactgtgcaaaacggcgctggaacacggcctgaccggactggaatttgcttatggcatccccggcacggtgggcggcgcagtctacatgaacgccggtgcctacggcggtgagatgaaggacgtgctgaccacggtgcagtaccttaccgccgaaggcgaagtgaaagagtcggcggcatcggagcttgacctgcgctaccgccacagcatttttgaagaaaacggcggctgcatcctttcagcgcagtttgccctgaccccgggcgagccggaagccatccgcgctaaaatggacgagcttatggcaaaacggctggacaagcagccgctggataagcccagcgccggcagcactttcaagcgcccggtgggtgcttttgccgctgccctcatcgaccagtgcggtctgcggggctaccggcacggcggtgccgccgtcagcgagaaacactgcggctttgtggtgaaccttggcggcgcgacctgcgctgatgtgctggcactatgcgaggaagtacgcaccatcgtaaaagaaaagaccggttatgatttggaaaaagagatccgcgtagtgcgctgagctgcgggaatagagggagtggggaacacagatggagctgttgatcgtcagcggactttccggcgcgggaaagtcagtggctatgaatgcgctggaggatatcggatttttctgcattgataacgtcccggcggggctgctgcccagcattacggcgttttccaaggcgggcgacaaccagttggagcgggtggcgctttccatggatgtgcgcggctgccgcagcaggaaacagatcgagactgccctgcagcagctggacgagcagaaaacaccctataagattctgtttctggatgcaccggacgatgtgctgatgcgccgttacagcgagacccgccgccgccaccccatcagcattgcagagggcatctctaccagggatgcctttttgaaggagcggcagatcttacagcccttaaaggaacgcgcaaactataccatcaataccggtctgctttctacctctcagaataaagagcgtatctgcgatttgttcatgaaaaacggcggggcaaaaaatgccatgcgtctcaccattatgtccttcgggttcaagtttggtttgccgccggaggccgaccttgtgctggatgtgcgctgtctgcccaaccctttctatgtgccggaactgaagcacaagaccggactggatcaggaagtggtggattttgtcatgggccactccgaagcacaggagctgctgcaccggtacgagaactttttgcagtacgccctgccgctctatgtcaaggaaggcaaaagtcagctgaccattgcggtgggctgcacaggcggcaagcaccgctccatcacatttgcacgcaagcttgcggaatactgcacctctctgggctacgagcccggggtgcagcaccgggatgccgtgcgctgaaaacagaggaaatactatgagttttgcatccagtgcgcgggaggaaatcgcgcagcgcagccccaccaaggaatgctgtgtgcgtgcagctgcctatggcattgcctgctttgccaaatactttgatgcccgcggccttgtgctgcaaaccgagcaaccccatacggtgcagctggcgcagcagctgtttgcccgctgcggcatccggggcgagatcctggaaaagccccgcgtcagcggtgtgctgtacgagttcaatatccgcgatgcggagcaggtcacccgcctgcacgagctgttcggcacaaccggcagggagaccagcttgcagatcgaccccgggctcatccgctgccagacctgcgtcagtgcctatatcgccatggcctttttgtgcagcggcacggtcaccgacccgcaaaaggaatataatctggaatttctcacctcccggacgaacctcgcccgggattttgaagcgctgctggctgagcacgagtttgcgccccaccgcacccgccgcaacggcgtgaacctgatctacgtcaagaccggtgccaatgtggagcggctgctccgctttatgggtgctgcggatgctgcaacacagatcagtgtgctcaaggcgttcaagcaggtgcgcaatcagaccaaccggcagaccaactgcgataccgcaaaccttggcaaaacggcgcgggcgaacgctcagaccctgaaggctatccgctatttgcaggaacagcacgcactggagaccttgccggaggtactgcagcaggcagcagccaagcggctgcaatacccggatctttcgcttaccgcgctgtgcggctgctttgatccggctgtgagcaaatctggcctatcacaccggatgaaaaagctggaggcgctggcggaaaatctgcgccagcgtcagcaggagggacaggaggcagtacaatgagtgaacccaccgcaaatacccgttcctttgcccatttgcatatccatacggaatacagccttctggacggtgcctgccgcatcgaccagctgatggagcgggtgaaggagtgcggacagaccgccattgcctgcaccgaccacggcgtaatgtacggctgtgtgcagttttataaagccgccaaaaaggcgggcatcaagcccatcatcgggtgcgaagtgtatgttgccacccgcacccgctttgataaggtaaataaaatagacggcaataaccacctgattttactgtgcaaaaacgagaccggctataagaacctgatcaaaatggtctctgccggctttgtggagggcttttactccaagccccgtgtggataagcagcttttggagcaataccacgagggactgatctgcctttcggcctgtctggcgggcgagatcccgcaggccattctggcaggggactacgagcgcgcaaaggcgactgcgctgtggtaccgggatctgttcggtgcagagaattactacatcgaattgcaggatcacggcctgaaagaggattccactgttctgccgcagctcatcaagctttcccgggagacgggcatccccatggcagccaccaacgacgcccattatctgcgcaaagaggacgccaagatgcagagcatcctgctgtgcatccagaccggcaagaccattcaggacgccgaccgtatggagttccagaccgatgaattctacgtcaagaccacagacgagatgtacgagctgttctccatggtaccggaggcctgcgccaatacggcaaagatcgccgagcagtgcaattttgactttgagttcggtcacaccaagatcccctactacaaagccccggacggcatggataatcaggcctactttgaaaagctctgctgggacggcttggagcgccgctacggcccggacgtgccgcaggccaacatcgaccgcctgaaatacgagatcagcgtggtcaagaccatggggtataccaactactacctcatcgtatgggactacatcaattttgcaaaaagtcagggcatcccggtggggccgggacgaggttccggcgcgggcagtattgccgcctactgtgttggcatcacggatatcgaccccatccgctataacctgatcttcgagcgctttttgaaccctgagcgcgtcagtatgccggatttcgacgtggacttctgctacgagcgccggcaggaggtcatcgactacgtcaaccgcaaatacggtgcggaccatgtggcgcagatcgttacctttggtacgatggcagcccgcaacgccatccgggatgtgggccgtgtgatgggtattccataccagcaggtggacgtggtagcaaagcttgtgcccatggaactgaagatgaccctcaagcgggcgttggaggtttccagcgagctgaaaaagctctacgataccgacccgcaggtgaccgaactcatcgacaccgcactgaaggtggagggaatgccccggcacgcctccacccacgcggcgggcgtggttattacgccggaaccgacggattattatctgccgcttgccaccaacgacggcctgccggtgactcagttcaacatgaccgagatcgaagagctgggtcttttgaagatggactttctgggtctgcgcaccctgactgtcatccgagatgcggaggttgcggtacaaaagcagcacccggagttctccatccgtgatctggactatgacgacccggatacctacaaaatgctggggcagggcgataccgagggtgtgttccagctggaatcctccggcatgaagcaggtgcttgtggggttgcagccccagaaccttgaagatgtcatcgctctgatcagtctgtaccgcccgggccccatggactccattcccacctatctgcgcaatcggcacgagccggacaagatcagctacaagactccgcagctggcacacattctggatgtgaccaacggctgcatcgtctatcaggagcaggtcatgcagatcttccgggaactggcgggcttctccttcggacaggcagataacgttcgccgcgccatgagcaaaaagaagcacgccgtcatggaagccgagcgggaacattttgtgcacggctgcaccgagcccggccacgaatgccccggctgcgttgccaacggtatcccggagcaggtggcaaaccagatctacgacgagatgtccagctttgcgtcctacgccttcaacaagagccatgcggcctgctacgcctatgtggctttccagaccgcttacctcaagcgccattaccccagccagttcatggcagcattgctgaccagtgtgctggataatacggataaggtcattgagtattccggcgagtgcgcccgtttgggcatcaaggtgctgccgccggatgtaaatatttccaacggcggctttaccgctgatgataacggtcagatccgttttgggctgaacgccgtgaaaaacgtaggccgcaacctcatcgaaaacgcagtcaccgagcgtaaggaaaagccctacacaagcctttatgatttctgcaagcggatgcacggcagtgagttgaaccgccgcgcggtggaaagcctgatcaaagccggtgcctttgactgcttcggctccaaccgtcacagcatggtggaggcggtagagggcatcctcaagagtatcgagaccgactctcgccgcaatctggaaggacagttggatctgttctccgtgatgagcggggaagtgcagcaaagcccgcaggaggacgtctacgagatccgccccttggcagagtacacccctgccgagctgctgcaacaagaaaaagaggtcagcggcctgtacctgtccggccatccgctggacgcttaccgggaaaaatctgcccgcatcggctcccacaccatcaaagacctcaccggcgaggatgcccatgtgcaggacggcgaaaaggtgcgtatcgtgtgtgcagtagtcaaaaaccgcatgatgacgacaaaatccaacagcatgatggcctttaccagtgtggaggatctgaccggcaccatggaggtgatcgtgttccccaaggtgctggacaggttccgggatgccattcaggaaaacgctgttgtggtcatcgatggccggctttccgtgcgggaggatgaagcctccaagctgctggcagacagcattctgcccattgacagctacgacccgacccgcttggataaaggccgcccggaccctgtcaaaacagctgcccggcgggtattcatccgtctgccgtcccgcagctgcccccagtacgataaagtggtgaacctgctggagatctttgatggcgatatcccggtgatcctgtatctggaagataccaagcagaagctggccgcaccgcgccggctgtacacttccgggcatccgctcttcttcaaagagctggagcggctgctgggcacagaaaacgttgcaacaaaatgacatatttgtgcacgaatggcactgcatgggacgatttcaatttttccaagtggtacaaattgcaaaaataatgcgatgtaccgtcattattttgcaccgcatggaattgcataaagtctcaaaaccctattgaaatttgtctggatggtgtgctataatcattaaaggcgaatcaaagctgttgcaaagcaactggcctgtttctggaagaagagggtacaggcaaaagggtaaatgaagaactgaactgtaaattggagggaatctctcgtatggaaaagcaaatcaaaacgattggcgtgcttacaagcggtggtgatgctcccggcatgaacgctgctgtgcgcgctgtggtacgcaccggcctgcataagggcttccgtatgatcggcattcagcgcggctataacggcctgctgaacggcgagtgctttgaaatgaacctgcgcagcgtttctaacatcatctctgctggcggcaccattctgtatacggcacgctgcctggagttcaagaccaaggaaggtcaggataagggcgctgaaaagtgccgcgagctgggcattgatgcgctggtcgttatcggcggcgacggctcctaccgcggtgcccgcgcactggcacaccgcggcatccccatgatcggcctgcccggcaccattgataacgatatcggctgcaccgattacaccatcggctacgataccgccatgaacaccgcgctggaaatgatcgacaagctgcgcgacaccacccagagccacgaccgctgcagtgtggtcgaggtcatgggccgcaacgccggttacatcgctctgaatgtggccatcgcctccggcgctatggctgtgctgctgcccgagaaggaattcgatatgcagcgcgacattctggataagatcgccgagacccagaagaccggcaagcgtcactttatcatcattgtggccgagggcgtgggtcatgcacaggagatcgccaacgagatccaggcacgtaccggtatcgattcccgcgcaaccattctgggtcatgtgcagcgtggcggttctcccaccctgcgcgaccgcgtgaatgcttctgccatgggttatcaggctgtctgcctgctggagcagggcaagtataaccgcatcgtcggcatgaagggtgagaagctggtggactaccccgtggacgaggctttggaaatgaccaagagtcttgaccccgtgctggtggacgtgtgcaacaccatttccatctgatcataacatttaatgcaagagccattctctcaggttttctgagcggatggctctttttgccgccgatttttcagaattgacgtattataagtaaaaaccaacaactttttgtttacaagtgcctccaaatcagttatactgagaaaaacggaggtgctgccatgaaatacagctggatcgacacggaacttctgcaaaagcctagcgttaccaaagacttacaggcagagtggaactggataaggtatcacatcggcggcaaaatgtttgcagccgtctgtctggatgatgctacgggaaagccggtgtatatcacctgcaagctggaccccgccgagggcgattttctgcgccgacagtatgaagatatcattccgggctactatatgaataaggtgcattggaactccgtaaaagcagagggaaatgtgccggacgcattgctgcgggagatgctggaaaaatcttatcgtctggtgctgggcagcttcagtaaaaagaaacagcgcgcgctgctggaaggggaaaagaaggatgccatttgactacaagaaagaatataaagaattttacctcccgccgaagaaaccgcaaatcatcaccgttcctgcgatgaattttgctgcggtgcagggcaagggcgaccccaacgacccggcaggggaatacaaggcagcgctggagttgctgtacggcattgcatttactatcaaaatgagctataagggcagccataagatagacggctatttcgaatatgttgttccgccgctggagggactgtggcatcagcccggggcagagggtgtggatttttccaacaaggagacttttatctggacctccatgatccgtctgccggaatttgtcactcgtgccgaatttgactgggcggtgcaggaagctacggccaaaaagaaaaagaacttttccaaggtggaatttttcacctatgatgaaggcctgtgcgtgcagtgtatgcacatcggctcctatgataccgaaccggagaccctgcggcagctggatgcgtttgcagcagagcagggatattgcccggatttttcagacacgcgcttccatcacgagatctatctgggagacccgcgccgcaccgcaccggagaagctgaaaaccgtgctgcgacatccgatccgcagaatgaaatgacagaaaacttcacaaaaactgtcgctttttgttgtgagatgtgctatactaaaattatctgtagaaacacacttaaaaatggaggaaaacatcatgcagcatgaaactgtcatcgtgctggactttggcggacagtacaatcagctgattgcccgccgcgtccgagaaaataatgtctactgcgagatctattcctataaaaccgatctttcggtcatcaaggccaagaatcccaagggcattatcttcaccggcggccccaacagcgtttatctggaggactctcccaccatcgaccccgagattttcagctggggcgtgcccgtgctgggcatctgctacggcagccagctgatgatgcacctgctgggcggtcatgtctgccgcgctcccgagcgtgagtacggtaagaccgaggtgttcgtgaacaccgagagcaagctgttcaccgatgtgcagccctctaccatctgctggatgagccacaacgactacatcgagcaggcggctcccggcttccagatcactgcccacaccgcaaactgccctgtggcagccgttgaaaatgccgaaaagggtctgtatgcggtgcagttccacccggaggtgctgcacaccgccgagggcaagaagatgctgcgcaacttcgtgtacaatgtctgcggctgctccggcgattggaagatggattcctttgtagagaacaacatcaaggctctgcgcgagcgcatcggcgagggcaaggtgctgtgcgccctgtccggcggcgtggattcctccgtgctggccgctatgctggctaaggccatcggcaagcagctgacctgcgtgttcgtggatcacggcctgctgcgcaagaatgaaaaggaagaggtctgctctgtctttggcccgggcaatgccaacggctttgacatcaacttcatctgtgtggatgcccgcgaccgctacttcagcaagctgaagggcgtcaccgagccggagcgcaagcgcaagatcatcggcgaagagttcatccgcgtgtttgaggaagaggccaaaaaaatcggcaaggtagacttccttgcacagggcaccatctaccccgacgtggtggagagcggtctgggcggcgagtccaccgtcatcaagagccaccacaacgtgggcggcctgcccgatactgtggacttcaaggaactggtggagcctctgcgtaacctgttcaaggacgaggttcgtcaggccggccgtgagctgggtctgcctgagtatctggtcagccgtcagccgttccccggccccggtctgggcatccgcatcatcggcgaggtaacccccgagaaggtcgctatcgtgcaggacgctgacgccatctggcgcgaggagattgccaaggccggtctggataaggagattagccagtattacgctgcactgaccaatatgcacagcgtcggcgttatgggcgacgagcgtacctacgattacgccgttgcgctgcgcgccgtgaccaccaccgacttcatgaccgcagaaagctatgatatgccgtgggatgttctgggcactgtcaccagccgcatcgttaacgaagttaagcacgtcaatcgtgtgttctacgattgcaccggtaagccgcctgcaactatcgagctcgagtaatttccaatagcgccatcaccccggaggggtccgtgaaaacggaacctccggggtgtttttatctttcggcacgatcaaacaagccataacgttcaaagcgtctcctatatcagcgctcccccgaagtcttttgaacgcagtattttacacaaaaagtccgaaacctctttcttctctgcctgcaggggagtataatagattctgttgtttgcaaaataggaaaggggaagtatcaactatggaatcgaagcagaggcttttggagccgcagctcgtccaaacaggaagggcagatcagttcagccgtaaggtgttctgtgacggaatgcgggacggtgtgcccattgcactgggctattttgcggtatcgttttcgttgggcatcgcggcgcgcaaggcgggttttacgccgtttcaggggtttcttgtcagcctgctgaacaatgcctccgcaggagaatatgccgcatttgcgttgatcatggcaaacgccacctattttgaggtggcggtcattactttaatcgccaatgcgcggtatctgctgatgagctgtgcactggcacagcgctttgctccggaaacgcccttctggcatcggctgctcatcggctatgatgtcacggacgaactgttcggcattactatcgcccgcccgggcaacctgaacccgtactatacctatggcgctatcctgctggcagcgccggcttgggcttgtggtacggcgctgggcattatagcgggcaacctgctgccgctgcgggtagtcagcgccctgagcgtggcactttacggaatgtttctggccatcatcatcccgccggcccgcaaggatcggatcgttgcggtgctggtcgtcatcagctttgcgctgagttttctgtgcagctatctgccgggcatctcggcactctccgaaggcacccgcaccatccttttgacagtggcgatctccggtgcagcagcggtgctgttcccggtcaggcaggaggaaaacgaagatgacgcataacaattatatctatattgcggtcatggcgctggtgtcctatgccatccgcatcctgccgctgacgctgatccgcaaaccgatcaaaaaccgcttcatccagtcgtttttgtactatgtgccctatgtaacgctggctgtgatgacctttccggccatcattcaggcaacgcagagcccggcagcaggtgctgctgcactggtagtcggcattgctgccgcatggtttggcgcaagcctgtttcaggtggctgcaggctgctgtgccgtggtgttcgtgctggaattttttatctgatgccttattgcgggagaacaaaatgaagaagatccttgtaaccggtgcaggcggctttgtaggttcccgcgtgatgcagcaatgggcggggcattacgaactgtgcacctttcctaaaggctttctggcaacagcaggggaggacgccgtgcggcaggctgttttgcagcagcgcccggatgtcattctgcacactgccgccatttcggataccggctactgcgccggccacccggagcaggcttaccgcgccaatgtggaactgtcggtctggcttgcccgggcggcagctgagatcggcgcaaagctggtggctttcagctcggatcaggtctatgccggtgtggagcagtccggcccgctgccggaaacaattccgttaaagcctgccaatgtgtacgggcagggcaagctggaaatggagcagcgggtgcaggcgctctgcccgggtgccgtattgctgcgcgccacatggatgtacgacctgccgggctaccggctgcccatccggggcaacctgccgctgaaccttctgcgtgcggcgcagcggggagaatctgtccgcttttctgtctgggacttccggggcatcacctatgtccggcaggcggtagcactgctggaagctgccctgaccctgcccggcggggtctataactttggcagtgaaaacgctgaaaacatggtactgaccgcccggcagtttgctgagacactggggatcacggtcgatattcaggaagctgactgggcacggaatcttgcgatggattgcagcaagctgcaggcgcatggcatcgtatttgacactacacaggcagggctgacgcgctgtttgcgggattatggactgctctgaccgcagaaacaaaaatttttccgtatcgcacaaaaaacagagaaaagcacgaaaaaagcaggggattctgtatgatgccagccgaatcaggctggacaaatcatgcggaagtcctgcttttttgcttgtctgccggagaaaagttcacttgtgggatgcagcaatttttcatacaaaagtcatacttattttacatcttatctgcattttgctataatattttcgctttttttgcaaagcatccgaaccgcataaacctttaaaaccttgaggagagtggattttttgaaggaagtcaagcttgaagaagcggcttatcagtttgaagccaaaatgtctctgcggcaggcgatcccgctgggcttgcagcacgtctgcgccatgttcgtgggcaacctgaccccgctgctgatcatcaccagcgcctgtggcattgcaggcggcgagtttgcagacctgcaggtcaccctgctgcagagtgccatgttcgtggcaggtatcgtcacgctggtgcagctgttcaccatcggacccgtgggcggtgcagtgcctatcatcatgggtaccagttccggctttatcggcgtgttcaacagcgttgttggcacgatgggcggcggtgtgctggcctatggcgcgatcatgggcgcatccatcatcggcggtatttttgaaagcgtgctgggcttcttcctgaagccgctgcgcaggttcttcccgccggtggtcaccggcacggtggtgctttccatcggtctttcgctgatctcggtgggtatcaactccttcggcggcggcaacaaggccaaggacttcggctctgtggagaacctgcttctggcactgttcgtgctggtggtcatcctgttcttcaagcattggactaccggttttctcagctcctccgccatcctcatcggcattctggccggttatgtggttgctttcattatgggtctggtgctgcccaccaccggcgtgactgctgatggtgtagagttcaccaaggcatgggtgctcaactggaacaaggtggcacaggcctcctggttcgcagtacccaagctgatgccggtcaaggtggtattcgatgcccgtgcaatcctgccggtgctgatcatgttcatcgttaccgcagtggagactgtgggcgatatctccggcgtgatggagggcggcatgaaccgtgagccctctgataaggagctgtccggcggcgtcatctgcgatggcctcggctccacctttgccgcactgttcggcgtgctgcccaatacctccttcagccagaacgtgggtctggtggccatgaccaaggtggtcaaccgtatggcactggcctccggtgccgtgttcctgatcctctgcggcctgatccccaagctgggcgcgctgatttccatcatgccgcaggccgttctgggcggtgctgccgttatgatgttctcttccatcgtggtcagcggcatccagctgatcaccaaggaaaagatgactccgcgccacctgaccatcgtgtctgtggcactgggcgtgggctatggcatgggtgccaacagcggcattctggcacaggctccgcaggccctccagctgatctgcggcgagtccggcattgttccggccgcctttgtggcaattctgctgaacgtgctgctgcccaagaacgatatggcagaataaattttaacttttttgtcgggcaagggcttccagctgctgcaacacctccggggtgtctgcatccagcagctctgcgctgtccgcaatgtaaaccgtgcgcacctgcgcaggatactttttaagcagcacgttgccgcctttattttccggcagggtgagcagttccggaaagaaactgcttccaaacagaacgggacttccaacaagaggcgccgggtcgttttcggccacggctcccagacggaagatctcccgttctgtttctttttgccattctgccgggtacaaccgctcctggcagaagcgctctgtcatagcttctaccgtctcccggcgcagcaggggctgatccccgggcagaaacatacaaccgctaagctccggcagctgctccagcagcgccgaaagacccagccgaacggtatcgttgcggccgggcaggctgtgcagcagcaccgggacgccctgcgccctgcacagtgcctgcacctcctccgagcgggtcaccacgatgcgggcagcgataccgggtgtggcggtagcgtcaaaagcacggcagagcatgggctgcccgcaaaaatctgccagcagcttgtttgcaccaaaccggcggctcagcccggaggccatgatcacacagccgaccgtaagcgacttcttcatacaaaaacaccccttcagcagcattttataatagtattatatcgaaagctgtgctaaaataaaagcagagatatcgcagcgatagaaaagagaggtactgcacatgatgacgatccgagaatacaagcgggcagaaagtctggaggaagcgtggcagctgaaccagaaaaaaccaaaccgcattttgggcggcatgatctggctgaagatggaaaccatcaatgtcggcaccgccatcgacctttccggtctgggactggataccattgaggagaacgaggagggcttttccatcggcgctatggtcaccctgcgtcagctggaacagcacccggggcttgccgcctacacccacggcgctatgcgggaggctgtgcgccatatcgtgggcgtgcagctgcgcaatctggctactgtgggtggcagcatttacagccggttcggcttttcggatgtgctgaccatgttccttgccatggattgtgatgtggaactgtacaagggcggcatcctgccgctgcaggaatatgcacagcgcccctacgaccgggacattctggtgcggctgattgtaaaaaagacaccgatgcagatttattaccagtcggtgcgcaacagccagaccgatatcccggtgctgacctgtgctgccgcccggatggagaacggcgattacagcatcgtcattggtgcgcgtccgctgcgcgccgtgcggttcgaactcccggcagagcctgcccttgcggcagaacagcttgccgcgcagtttgccgaaagcgtaaaggcgcagatcgttaccggatccaatatgcgcggcagcgccgaataccgcagacatctggcaggcgtgctgacaaagcgcgcagtgctggagctggaacagcgtaaaatgcaggaggaaaagtaaatgcagatcacacttaccttgaacggcatccgggtgtccgaggagatcgccccggatatgcttttgatcgattttgtccgtgcacacggctgcaagagcgtcaagcgcggctgcgaaacttccaactgcggtctgtgcaccgtgtttatggacgataagcctgtgctgtcctgctccgtgctggcagcccgcgccgatgggcacaagatcactacgctggagggcttgcaggaagaggctgccgagtttggtgcctttattgcagatcagggtgcagaacagtgtggtttctgcaacccgggctttattatgaatgcactggctctgttccgggagcagccgtaccccactgaagagcaggtgaaggaataccttgccggaaacctgtgccgctgctccggctacgaaggccagctgcgcggcattatgagctttctggcatggaaaaagcagaaggagggcgtacagtgaaaaccgtcaacaaaccgttccgcaaaaaagatgcgatgcagctggtcaccggccagcctgtctatatggatgacatcatcccgcaggactgcctgatcgtcaagctgctgcgctcgccccatgcaaacgccatcgtccgcaccatcaacaccgctgttgccaaaaaagtgcccggcatcgaagccatcttcacttgggaggatgtgccgcaggatgctcgccgttatacgcaggccggccagacctacccggaggccagcccctacgaccgtctgctgatcgatcgccacgtccgctttgtgggagacgtggtggccatcgtagccggtaaggatgaaaagtgcgtggacaaggcactcaagctcattaaagtggattatgaggtgctggaagccgtgctggatttccacaccgcaaaggataatcctatccttgtgcacccggaggataactgggaaagccttgcccccgtgggcgccgacaacaagcgcaacctctgcgctcatgatgaatgcggcaatggtgatatcgacgctgtgctggccgggtgcgatgtggtcattgaccatgtgtaccacactaaggcctgtcagcaggccatgatggagaccttccgcacctattgttccattgatacttatgggcggctgaatgtgctcagctctacccagatcgtgttccatgcccgccgcaacatcgccaatgcactgcacattcctaagtccatggtgcgtgtctccaagccccgcatcggcggcggctttggcgccaagcagactgcggtcagtgaggtgtacccggcctttgtgacttggatgaccaaaaagccttccaagctcatctttagccgtgtggaaagccagacggcttcctcgccgcgccacgagatggagatgcacgtccgtctgggcgctaccaaggacggcatcgtgaagggcattgacctgtacaccctgtccaacaccggtgcttacggcgagcacggccccactaccgtgggcctgtccggtcataagtccattccgctgtacggcaaggccgaggcattccgttttgtcagcgatgtggtgtacaccaaccacatgtctgccggtgcataccgcggctatggtgctacacagggtctgtttgcggtggaatctgccgtgaacgagctggcgcacaagctgaacatggaccccattgcactgcgcctgaagaacactgtgcaggagggcgatgtgatgcccgcctactacggcgcagtaaataccagctgtgcgctggaccggtgtgtgcttaaggtgcgcgagatgatcgactgggagcacaagtacccctcccgagatatgggcaacggcaagatccgtgccgttggcatgggcatggcgatgcagggctccggtatctccggcatggacgtgggcagtgctaccctcaaactgaacgatgacggcttttatacccttatgatcggtgctgccgatatgggcaccggctgcgatactacgctggcgcagatcgctgccgaggtgctggactgtccgctggataatattaccgtctttggtgcggatacggattcttccccctacgattccggctcctacgcttccagcaccacttatgtcaccggcaaggccaccgaaaagtgcgccatgaagctgcgggaacagatctgcaaactgggcgcagagctgctggactgcccggcggatgccgtggagtttgacggtaaggtcgtgtttgagagcgccgaccccacccgccaaaagaccctgtccgagatcgcctttgcttcccagtttggccataagatcccgctggaatttaccgagacccatacctcgcctttgtcgccgccgccgtatatggtgggcgctgccgaggtagaggtggataccgagaccggcgaggtgaaagtgctggaatttgacgcctgcgtggactgcggcacccccatcaaccccaacctgacccgtgtgcaggcagagggcggtattttgcagggcatcggtatgaccctgaccgagaacatcacctacgacagaaacggatacccggaggagaactctctgttccagtacaagatccctgcccgcaacgatatcgggcatatccatgtggagtttgagaacagctatgagcccaacggcccctttggcgcaaagtccatcggtgaggtggtcatcaatacgccgctgcccgccatctcggacgccatctacaacgccatcggcacccgcttctacgagctgcccattaccccggagcagatcgcaatggcagttgcagccaagcagtaatagcagatgctgaacgaaaaagagcttccgtttctggcagagaaagggcatatcgtttctctggtaggcggcgggggaaaaacgaccctgctgtatgccatggcagaccactgtgcccgcaagggatggcaggtgcttgtgactacgaccacccacatccggcaaccggcagcctgctatgcaccggatgacgcagcgcttaccgccttatggcaagcgggtcgctatgcagtgattggcaccccggcagaaaacggaaagctgactttgccgccgccgcagcttttgcgccggatggcacaggcagatgcggtattcattgaggcagacggggcaaagcactacccctgcaaggtcccggcggcgcacgagccggtgctgctgccccaaagcgatatcgttttggcgctggcagggctttcggcgctggataggcccttgcgggaggtctgcttccgctacgataccatccgtccgcagtttttagcggctgcgccggatgcacctcttacgccccctgtgctggcacagctgcttgcaagcacgcagggtggtcgcaaggcggtgggcgaccgacagttttacgctgtactcaatcaggccgacacgccggaattgcagcagcagggcatacagatacaacagcttttgcgtcagcatggtataaagtgcgtgctgacgcattttgaagaggaagaacgtgcatgagcaaggaagataagatcgtgttctgtaccggcggcggctgcaccgcaaagctgggtgccggggtgctgagccgtattctggaaaagctgccccggggcgaaaaagacccggatcttctggtcggctatgacagccgggatgatgccgcagtctaccgcattacggacaacattgcactggtgcagactgtggacttttttccgccgatggtggacgacccctatacctttgggcagatcgcagccacaaacgccctgagcgatgtctacgccatgggcggcgaggtaaaaactgccttaaatctggtctgttttccggaggatatggacttgaatgtgctgggcgagattttgcgcggcggtgctgaaaaggtggcagaagccggcggcagccttgcaggcgggcattccattgcagacagcggggtgaaatacggtctttctgtaaccggccttgtagacccgcaacggatgtatacgaacgacaccggtatgccgggcgacaagctggtattgaccaaggctttgggtgtggggctgctgtgcacggcagaccgtgtgggcgaagccgccccggaggagatggaagccgccatccgctccatgaccactctgaacaaaacagcggcagagatcagccgcaaataccgcgtccatgccgctacggacgtgaccggcttcagctttctcggccatctgcatgagatgatgggcggcaagctttcctgcatcatccatgcggatgcagtgccggtgcttccgggcgcccaaaaagcagccgatgcgtttttgtacaccgccgccgggcagcgcaaccgcaaccacaccgggccgttcgtccggtttaaaaacgtaagcttcgccatggaggaagtcctgttcgacccgcagacctccggcgggctgctatttgcagtagacccggcagatgcagcaacactggaacaggaactgcgcgccgcaggtctgcccgcgagcatcgtgggagagatcctgcccaagcaggaaattgagatcaccgtaacagacaaatgagaggagtaatcagcatggctgaatttatcaaagtggatgcactgggcgatgcctgcccgctgcctgtcgtcaaagcgaaaaaggccatttccgagctgcagggcgcgggacaggtggaggtactggtggacaacgagatcgctgtgcaaaacctgaccaagatggcacagcaaaagggttatcagtacagcgctgaaaagctggaagagcgcaaataccgtgtgctgttcacgctgggcgaagtagtaagcgccccagcagaagatgctcctgtctgcacctctgatgcccgcactgatacggtggtggctatttccgctgccgttatgggcgatggcagcgaggaactgggcaagaccctgctcaaggcctttgtatttgcgctgacccagcaggataagctgcctaagaccattctgttctataacggcggcgcagcgctaacctgtgaaggctctgccatgctggaagatctcaaggcgctggaagcacagggcgtagagatcctgacctgcggtacctgtctgaacttttacggccttaccgagaagctggctgtgggcagcgtgaccaatatgtacaccattgccgaaaagctgacgcaggccggaaacgtggtaaaaccgtgatctatctggataacgcggccaccactctgcataaaccgccgcaggtggaacaggctattctggaggcactgcacacggcaggcaaccccgggcgcggcgcacacgagcccacccttcacgccgcacggatcgtgctggacacccgtctggcgctggcagaacttttccatgtgccggacccttcctgcatcttttttgccgccaatgcgaccatggcgctgaacacagtactgaacggcgtgctgcatccgggcgaccatgtcatcacaacggtatgcgagcataattctgttctgcgtccgctgtaccggctgcgggcacagggggtagaggtctcttttaccggggtggatgcagctgcacagctttgttacgaccagtgggaaacgctgctgcaccccacgacccgtgcactggtggtgacaggggcttccaacgtgaccggcaatggcaccgaccttgcccgcgcagcggactttgcccaccggcacggtctgctgttcatcgtagatgctgctcagactgccggtgcacagcccattgatgtgcagcagctgggcattgatgccctctgctttaccggccacaaggcacttctggggccgcagggcaccggcggagcttatgtgcgccccagcctgcgcgttgcgccgctccttgtgggcggcagcggcgtgcacagctttgacgaaatgcaccccttgcagatgcccaccgcactggaggctggcacgctgaacgtgcacggccttgcggggctttgcgccggggtgcgctggctgttggagcagggcgtagaaaaccttgctgcccgggaagccgcccttgcccgcctgttttatgagcaggtgcgtactgcgccgggcgtaacagtgtatggtgatatggctatgcagcctcgtgcgcccattgtggcgctgaacatcgcacaggaggattctgcccgggtggcagatatcttgtgggaggactacggcatctgcgtgcgtgccggagcgcactgtgctccgctgatgcacaaggcccttggcactgtggagcagggcgtggtacggttcagcttttcccatttcaatacggagcaggaggtacagcaggcagcgcaggcagtctgtgcacttgcgcgggagattttatgcgagtaaaacgaagctatatcgtgctttccttccgcaccaccttagaggctatggagtgggaaaagcaatgcaatgcccggcaggtgcccgggcggctgatcccgctgccgcgtgagatctcggcagggtgcgggcttgcatggcgtatgctgccggaggactggcaaagctggcaggcagaactggatcagacacagtttgataaggtaacacctgtggagcaataattaagggagagaaacaccaatgaacagacaaacgcttgcagacgttctgcaaagtacaaaccagaccggcagctatacgctggctaccgtgctggaaggcgcagaggcaggcagtcagctgctgctgcgggacggagacgccctgtggcagacccagagtgccgaacttttgcagcgtcagcttgccgtcctgcaggcctgtaccgctacgggctttcttacactggaaggtcagcgggtatttgctgagcgctttggtgcggtgccgcagctggtggtctgcggcggcggtcatgttgctgctgcccttgtaaagcaggcaaagcttctcggcataccagtgcttgccatagatgatcgggaggaatttgctcagcagctgcgcgccgccggagcggataccgtgctctgcgctccctttgcgcaggcgcttcagggtgtgcccggcggggcggagacctattttgcggtgctgacccgctcccacgtctttgatctggactgccttacccggattctgcaaaagcctgcggcctatgtgggcatgatgggcagccgaggccgtgccgcattggtgcgccgtcagctgttggagaacggtctggacagccagcggatcgatgcactctgcgcacccatcggccttgccattggcgcacagacggctgcggagatcgcgctttccattctggcgcagatcgtgcaggtcaaaaatgcccgcccccagaccgagggctatcccgtcgcattgctggatgcgatggtgcaggcagaaaaagcccataccccggcggtactggctactattattgcgcggcacggctccaccccgcgggatgtgggcgcaaaaatgctcgttctgcccgatggcagtatagtgggcagtgtgggcggcggcattatggagcattacacggtacaggcggctcagaagctgttagcacaggctgtgcccgccttgcaatgcttacagctttcggctgacggcaaaaacgaggacacagccattgctgcctgtggcggctccatggaggtgctattgcagacacttttctccggggaggaaataaaatgaaaaaggacgccctaattatcgtgcgcggcggcggcgaccttgccaccggtaccatccaccggttgtgtagcgccgggctgcgagtgctggtattggaaacgacacagcccgcagccatccgccgtcaggtagctctgtgtgaagcagtgtatgaaggcgaagccactgttgagggtctgcgcgctgtccgcattgaagcattggaacaggcacagtccgtctgggcgcagggcgctgttccggtgctcgttgacccagagggggcctgtattgcccgggcaaagccggaggtcgtagtggatgccattctggccaagcgcaaccttggcaccagccgggatatggcaccgttgactattgcccttggccccggctttgtagccgggcaggacgtagatgccgtggtagaaaccaagcgcggccaccggcttggccggatcatccgggaggggagcgctatccccaataccggcattcccggcgtcattggcgggtacggtgcagagcgggtgatccatgcacaggccgccggtgtttttatgaatgtgcgtaaaatcggcgatttagtagagaagggtgagactattgccaccatccgcaccccggagggggcagaaatcccggtcacagcacagattcccggcattctgcgcggattgctgcgcagcggctatccggttacgccgggctttaagattgcggatatcgacccccggcgggaggagctttccaactgtttcctgatctcagataaatctcgctgtattgccggcagtgtactggaacttgtctgtgcgcaggtgtggcagtaaaacctatataaaaataacccctgccgttttgcggaaaggtctgcaaatacggcaggggttttaaggttctatgttagttgcggtagcagcgatcctgtcctacaagccagttttcgcacagacgctgggcttcctctaagctgcggctctcgcagtcaaagaaggcaccgcgcatagagcagtaggagtagtgcaccttaggaacaccattgccatccttgaagcgctcgtatcgttcttcaccgggcatcaaaaaaagctgttccatggttccttctcctttgtgttcaagcagtccaaacggccgccgggcggcggcacacaacgcttgctattgtatcacgatggagaacggtttgctatggtctttttatccaaagatacgcctcttttttctctgcagttgtggcgaagaagggattgacaaatcattcgtgcaaactgcgttgcttttccagcgctgctttcatgccgtggatacgccccagtgcataggagagcattgctgcgcacaacaggttcagccagccgtagcgagcctgattcaaagagttcgttatgccaaggatcaggtttgccagacagatcagggaaagcatccggtcgatgcggctcagatgcgtcagacgggagtcaatatccgagagcagctcaaagctgccaagctccgctttccgacggaagtacacccagttgacacagccgccgatatattctgcacccagttcctttacaaaggcgcggtaatcgctgctggggttcatctccaagcggatgatatattcgcccggttcgcagcgcacaaaggtgtaaaaggaaaaaccggtattgtccagtacccagccctcctgcgccatctcgttcagccagcgctcttctttttcaaaatcccacacaaagaaaagcttgaaaacggttttcttttccctcataaggtttcctccttcaggatgctctcaccatttgccacaagctgctgcaaacgggcaagctcgtgctttaagacctgtacgccctctgcggtaagctgatattcctttttgcggctgccgctctcagcgggcaggggacggatccagcctttttcacacagggaggtcaatgctccgtacagtgtcccggcggcaagatggactctgccaccggaaagctgctccgtctgctgcatgatgccatagccgtgctgcggatggtaaagagacaacaggatataataggtcgattcggtcaatgcaaggttttccatactgaaatactccatggattctatcggacgtctttatatcgtcagccgatatattgcgtttaaagtatatcgtctcccgatatactttgtcaagcgttttcagaaaaaggccatcaaaaagctttaaaacgcagttcgtatggaaaaaccgatggaatgcaggaaaatattttgtgcacttttcatagttttcttctgaagattttggtggtacaatatagttatcaaattctgcaattcgggaggagctccatggcggaaaagtgtattgaactggatagtgtagagatcgcagcggctgtttttggcaactgtgaccggaatattcgcttgttggaaaaagagttttctgttaccgctgtctgccgcggcacacagcttcgcatttccggcgagcctgccaatgtggcggcagcgaaccgcgccgtggagggaatgcttcttctgatcgagaaccgcaccccgctggaagatcagactgtgcactactgcatcagtctggcgcatgatggcgcagagaagcgggtaaaggagctgaccgaggactttgttaccgtcacggtcaagggacgcccgatccgccccaaaacgctgggacagaaggaatacctgagcgccatccgctccaatgccattaccttcggtgtcggcccggcgggtaccggcaagacctatctggccgttgccatggcggtgaaagccttcaaggccaaggaggtatcccgcatcatcttgacccgcccggcggtggaggcaggggagaagctgggctttctgcccggtgacctgcagcagaaggtagacccctatctgcggccgctgtacgacggcctgtttgatatgctgggcgcagagacctacgagcgtctggtggaaaagcagatcattgaggtcgccccgctggcttatatgcgcgggcgcacactggatgattcctttatcattctggacgaggcgcagaacactaccccggagcagatgaaaatgttccttacccgtatgggcgtaggctctaaggtggtcgttaccggcgatgtgacccagatcgatctaccgggcagcacccgcagcggtctggtggacgcgctgaaggtgctgaaggatgtgaacggcattgcacaatgctactttaccgataaagacgttgtgcgtcaccggttggtgcaggagatcgtaaaggcttacgagcgtgccgcacatccggctgccgatgcggaaaataaagaaaacaataagaattttaaataaatccctgaaaggagtggaccgatatgtccaataaagttttgatcaccaactcccagaaagctgttaaggtgccctccgggctccgcattctgatccgccgtgcctgcaatgccgtgctggaatatgagcatttcgaccgtcccgccgagatcagcgttacctttgtggacaacgctgccattgccgagctgaacaaccaataccgcaataagcccatgcccaccgatgtgctgagctttcctctgggcgagaacggcaagtacgatatcgacgagaataacggctgcatgatgctgggcgatatcgtcatcagcatggagcgcgccatggagcaggccaatctgtatgggcatccgctgcagcgggaggtagcctttttgaccgttcactccatgctgcatctgctgggctacgaccacgaaaacggcggtctggaggccatgcgtatgcgcgaaaaagaagaggctgtgctgctgcagctgggtctgccccgcacggtcagctatacggaatgatatcccagaacataaaaacaagacaggagttcgctttgagtactacaacacccgttcaggagcattacgacacctcctctgtattcgttgctgtcatcggacggccgaacgtgggcaaatccagcctgacgaacctcttggtcggcgagaaagtggctatcgtcacctctaagccccagactacccgcacccgcattaccggcgtgatcacccgggggccgctgcaatatgtgctgctggacacccccggtgtgcacaaagcccacaacaagctgggcaagcgcatggataagaccgccagcgattccattgcggatgtggatgtttccatgatgctgttcgagccttacggcgcgctgaacgaatctgagatggcacttgtggaggcgctgcaccgcagcggcccggccattgcagtcattaataagaccgaccttgttaaagaacctgccgatttggaaacccgcaaggcagagctgaaggcgctgggcgtgttcgatgagatttacaccatcagtgtgcgcaataaggaaggcagtgaggaactgttcgatgccttgagccgctatgccgtggaaggcccccattactttgatgatgacgcctataccgatatgccggaaaaagaattggtggctgaggtcatccgcgaaaaggcactgctctttatgcgggacgagattccgcacggcattgcggtagtggtggagcgcttcaaggagcgcccgggcacagacctgatcgacattgatgtgaacatctactgcgagcgggagagccacaagggcatggtcatcggcaagggtggtgccatgctcaaaaaaatcgccagcgctgcccgtgctgactgcgaggagtttttgggctgccgggtcaatctgcagtgctgggtcaaggtaaaatccgactggcgggataacgaatttttgctgaataacttcggctttaagcagaattcctccaaccgctgagtgatgccaaagcaggacagttttcccttgtatgctgtgctagaatcaggctgacactataacaaaagcagcctgtgcacagaaaagggaaggagtgctgaagatggatgctgctgcaagctggcaggcctttgcctgcacggggaacattctccgttatctcgactacaaacaactggtgcagctgcccgccgagcatccggcaggagaaacggacgatggaaccatttgtgaccatgggtctggtactgaaggagacccgttatagagaagcagaccgcattttgacgatccttaccccgaaactgggcgtgatcacagcaatggctgcaaacagcctgcggctgaaaagcaagctgttcagtgcctgcgggctgttctgctattcggagtttacactggtgcccggacgcaatatgtataccgtgcgggaagccgatgtgcagaacatcttccatggcatttcctcctccattgaaggggtaagccttgccatgtatcttaccgaattggccgctgcgctttcgcctaccggagaggaagcagcccgggagctgcgtctggtgctgaacagtctgtatatgatcaacgagcaccgcaccgacctgcgggtgatcaaggcagtatttgagctgcgcaccatgagtgagtgcggctttatgccgcagattgtctgctgccgggactgtggcacctacgatgaaggagatgccttttatctggacgcacaggaagggcatctgctctgtgcgtcctgtgcggcaaaggcaggcaagaactgcaatctggacaaggctgcgctgtttgcactgcgccacatctgcttggtagaggacaaaaaaatatttgcattcaagatctctgtgggcagtctggaaaagctttccgcagtggctgaaaactatgctctgacgcatctggataagccgctgaaaagctatgcctttttgaaaagcgtgctgccctgaccaaaaaggaacagtatggaaacaagctacttaaaaacattagaactggataagatcattgcgcgtgcagcggagggctgcgtatgcaaggaagcccgtgctatgctgctggccattgagccgcagtgcgacccggacgaggtgcgctacgcactggagcagacggacgccatcaacaccctgctgattaaaaacggctcgccgcgctttggcggggtagagggggtcagtcagcttgccgcccgtgccgtaaagggcggcgtgctttccatgggcgaactgctgatggtggccggtgcgctgcgcaattttcagcacctgaccagctggtacggctcctctgagcatgacgcgctgccgaccgatgatctgttttacgcgctggcaccggagccaggccttgagcagcagatctccagcgccattctggcaccggatgccatggcggataccgcctcccgcacgctggcagagctgcgcaaaaagatccgcgccaccgaaaacagcatccgcgaccggctggaaagcatggtgcgcaatatggacacctccaaatacctgcaggagagtgtggtttccatgcgcaacggccggtatgttgtgccggtcaagagcgaataccgcggcgaggtgagcggtatcatccacgatgtatcctctacgggcgctacggtgttcgtggaaccgcaggctgtggtggaggcaaacgcccgcattctgcagtaccgcgcacaggaggcacaggagatcgagcgcattttggtggcctttaccgcacaggtggccgccattgagccgcagttccagtacagctacaaggccatgctggaaatcgacatcctgctggcaaaggcgcggcttgcactggagttgaaggccttcaagcccgctgtgcggacggattcttcctttaatctgatccgtgcccgccacccgctgatcgatccgcaaaagtgtgttcctgtggatattgcactgggcggggaatacgattcccttatcatcaccggcccgaacaccggcggtaagacggtcaccctgaaaaccgccggtctgctgtgcgccatggcacagtgcggttttttgattcctgctgacgagcgcagcgagatctgtgtgtttgatgaatttctggtggatatcggcgacgaacagagcattgagcagagcctttccaccttctccggccacatgaaaaaaatcaccggtattctggaactggctatgccgcacacccttgtgctgctggacgagctgggtgccggtaccgatcccgccgagggcgccgcgctggcagttgccatcattgaggagttgcgccgccgtggtgtgctgctgatggcgaccacccactatgcggaactgaaggtttttgcactggagactaagggtgtggtcaacgccagttgcgagtttgatctggagaccctgcgtcccacctataagctgagtgtgggcgtaccgggcaaatccaacgcattcctgatcagcgaaaagctgggcatccccagccgcgtcattgaagcggctcagcagcatctgtctgccgaggataagcgtctggatgcggttctgggtcagctggacgacttgaagctgcagctgaaggaaagtcagaacgaagtggagcagctgcgcaacgaagcttcccatcagctggaagcagcccgcaaaaagcgggatgaactgatccagcagggcgaaaatgaattggaagctgcccgtgccaaggcgcgcacgctggcacagcaggtggaaacgcaggcctacgcactgaccgatgaactgcgccagctgcaaaaggacgagcgcatgagcgcccagcagaaggcgcagcgtgcccgcgaaattgccaaaaaggagaccgaaaagctgtttgccggtacggaggtggtgcataaccccgtcaaggagtttgtaccgctgaaggatgtaaaggtgggacaggaggtctgcattgcagaattgaaccagctggccaccgttctggcgctgccagacaaaaacggcgatgttctggtgcgtgccggtatcatcaagactaaggtgcccctcaagggcctgaagcagccggaaaagctggtaaaagaatccactgcgcctaagacaaaggcgcagcagcggtattcccgcctgaccggcgataccaaccgtcccaacggcagggtagagcgcgtacagcgcaccgccaaaatggagtgcaatctgctgggacttacggtggatgaggcactgtcggaggtggattcctttattgaccgcgccatcctgaacggacagacggtggtttatctgatccatggcaacggcaccggcgcactgcgcaccgccatccataagcatctgcgcggcaaccgcatggtaaaaagcttccgtcttggccgttacggcgaaggcgaaagcggcgtgacggttgtagaactgaaataaccccaaaggactgccttttgaaaaattggcagtctttttttgttgcagtgcagggaaaaggcgagtatactcgtattataaatgtaaaacgaacaggaagtaaaactttatgccaaccagtcagcgcagaccagtaaataaacatagcaaacgtaaaacgcaccgctgcaaaatgaggaaccggtttttacacggtttgctgtttgtttttgcggcactgatgctctgtttcggcctgtttttatggaaggcggcgctggaactgaacgcacccgcagaatccgcagtctcagtctcagcggaggactttcgccctgtggtgggcgacccgccgtaccgtgtggcagtggacgccggacatggcggcaacgacccaggcgcaaggggagtagtcgaggaaaaacaggtcacagcagcaacggctgctgcgctgcttcagtggttagagcaggacccgaattacattccgctgcagacccgggaaagctttgatgcaaccgccacgcctgcccagcgtgcagccgtagccagcgctcaaagcccgcagctgctgctgtccatccacggcaactccgcagccaatggctctacggcagccgggtttgaatgctatccggcagtgcccgggcgtacatggcatcaggaaagtttttattttgcaaaactgctggccggtggaatgcagagcatcggcgcaaggctgcgcgggcgagggggagtgcgttacatttattatctggaaaacgaccagaagcagctggtggagaatacctacacgcaggttcggcctgagcgcagctttacgctgctggaggatgtggattgtccggcagtgttggcagagcagtgttttgtgacgaacgatgaggatgtggagcattttggcagtgaacagggctgcaagactgtggcacgcatttattacgaagccatctgtacatacttcggcacagaaccgctaccggtgaaatgaacatcgcaccaccaaaggaaaagaaacgatactgcaggcataagttgaacgcttgaacatgctggtaatacgtccagcggcgcagaagcgggcatgtgtaaactgaatagcatccacagaagctgccgaaaatctgacagaaagagagaagggcagcttctctttttaattgtacatgtttcgtataatgcacgttatgcgaaacttagggaagtgaaaaatgcccatttcccggatttttggcgttccagcctcagctggctcattttcgggcttagttcagccgttctgcacattctgcaatttttatcatattttatggttttatttgtctcatgcttacagatgcttcctgtgttatgtgctgctgcatcggttcatttgtaattcattttattccagtaagcatccagtaagcatctaggtgcttgctttataacatttgtttttgtgtagacattacgttgcgcgtttctatggatgctcctgtatgtattgctgctgactgcttataatgtaaattataaagacccatgacgttatccggtcaagccggatcgcgccataggtctttgaatcgtctcagacgttttgtgcaggtttaagtatcgatctatgaatcgttggtttcttcgttggacattgccgagatatctgcccggaagccatcctgtgcagcgccctcaaaggccgccatagggccggacggctcagaagcgtcctctcccgctgggtcattttcaacagatgtctcccctgctgcatctgttgtatccaaacttgcttttgcagcattgatgggtagtaccttgcccagcgggttttcctcaatggcagagcgcacctgaaattcttgtaagtgcgtataaatttgtgttgttcccacactgctgtgccccagaagctgcttgagggtaaggatatccacattgccggtctgatacatcagcgttgcggcggtgtgccgcagcttatgggtggaaaagcccttcagccccgcagccttcattgcaccggagatcagctgttctactctgcggttcgaaatacgttccttgcgcatacgggtaataaacaccgctttttccttgggtgaaagtccctccatggtgttgcgcttgcgcagatatagttgcagtgcctccacgcaggcatcattcaggtagaccatacgctctttatggcctttgccgaacaggcggatctgacgctgctctaaatcgatgtctccaaggtccatgcctaccagctctgcaagacgcataccgcagttgaggaacagcaccaccatgcaataatcccgctccgggaaatcgctctgggtctgggtgctctccaaaagcgaaatggattgctctgccgtcaggtacttgggcaagaccttatcctgtttgggcgggcggatggccgccgtagggtcctcggataagcggttgacctgattgaccagataatcataaaagccgtgcagactggccaaccgccgggcggtagaggattttttgttgccgcactcccggttcagaaaatacagatattcgtagatatcctcttttgttatgctgccccagaaggccgtatccagccccttgggatcgatctctttgaattctgcatccgtggccacaagcccgcggcggcgcttcataaagcggctgaaggagcgcaggtcacagtaataactgaacgccgtattggcacttttgccggcgatcacttcaagataacgcacatattctacaatatccggcgcggcatcctcaaagggtgcgtgtttgccggggtttctttcgtccagataaatcgacataggttcctcgtttcatcacaggcggtcattttttagcgcattgatggcatctgcgatatacgctgcaccgaccagcttcatgccgggataatctgcggcattcaggtgtgcaaggctgtgctttgggataacagcccgctcaaagccgatacgctcagcctcgtgcaggcgctgttccagattgggcacactgcgcacttccccgcccagacctacctcaccaatggcgataagcttatcgctgaccgggcggtccagcagcgaggagaccatgctcaggcagactgcaaggtcgcaggcggtatcccgcagtgcaatgccgcccactatattgacatagacatccagattgccaaagaagtaccctgcccgcttttccagcacggcgatcaaaaggttcatgcggttatagtcgtatccgctgcaggcgcgacggggtgccggaaaattcgtcttggtggcaagtgcctgtatctcgctcaggatgggacgactgccctccatggtgcaggccacgcagttgccggaaacccccagcggacgtccttccagcagcatctgggagggattttcgatctcggcaagccctgtgccggtcatatcgaacattcccagctcattggtggagccatagcggtttttggctgcccgcagaatgcggtacggcagcatcttgtcgccctcaaagtagagcaccgtatccacgatatgttccatgaccttggggcctgcaattgcgccgtccttgttcacatgacccacgataaacatgggaatctcctgctttttggctaccgccagcagccgggcggcactctccttcacctgactgaccgtgccggacgaggacgagatatccatgcagcgcatggtctggatggagtcaatgaccacaaggtccggcttttctttttcgatcagaccgcagatctcatccacgtcattttccgccgccagaaagatgttatcctgcggtaccttcagccgcgctgcccgcagcttgacctgccggacagactcctcgccagtgatatacagcacgctgtgctgattggagatggcaccgcacagctgtaacagcatagtggatttacccacgccaggctcaccgctcaaaagaactacaccgcccagcacgataccgccgcccaatacgcggtccagctccgagataccggtcaggatgcggcttttttcctccgtggtgctgatctctgacagccgccgggcggtcagggtggtcacgccctcctgacgagccgcggcagcctgacgggcggcaggagtccccgcctttggcgcttcagcaacaacatcctcgttcatggtattccagctgccgcagctggggcatcgccccatccagcgggggcttgtctctccgcaattggagcatacatagacggattttagtttcatgtctgtccctcatttattatggtcttttgttattgtaacacactgcgccaaaacccgcaagaaaaggatgccatttacaggcggctgcccaaatacgaaagtcctgccgctgcaccgcaaagcggcagcagcaccaccatggtcagcagatactgccccagcagtgcctgcaccccggggcgggcttgtccgccgggatgcttgcggaaagaatatgcgtggattcggctgctgacctgcaaagcgcaggccccgaaaaagcacagacaaccgcttgctgctgccgccggtaagcctgtccatagcagcgccggaagtattgctttccacccaccagctgtgcatagctgtaccataagcagcccgctgcccaagccgtacaacatcatattgccaaagatcattacagggccaagggcagacagccccaataccagaaataggctgaccacaaggccgagtgtcaggtattccatgccgaaaagctgtaccgctccttgcatactgcccggcgcaaacagcctttgccacgcttccagataatactgcagcagttctgtctgccgggcatcgcatacggcctgcaatacaccggctgccgtacaccccaccagaaacgccgcagctagcagccagcaatcctgggtggcgtggcgctttgccgggatgcagggctctttttgcgtcaattgctctgccggttcagctgcctgtgccggtacaggcggaagggcagactctgctgtttgcaccggtaggccgaccgtctgcggcagcaaagaaaagttttcttctgattttgtctgttcatagatccacatacgctgttttctccctctgatggattcgatttgccggatcgatcaacgaagcgtgtgtctgcgactgcgcagggtgactccaagaagcccaccaatgcaaccgcagagtagcaccgccagaaggcggcataccacagcaggctcagcggctgtgccgttccatatagcagaaagcgccagcggcactgccagaaatgtactttggagcagtccggtcagcagaccgcgcgcctttttacgaaacgctgccgtcagtgcacacagcaggctgcccatgcacacggctgttgtggcaagtatcggcactacactgccggagcagccctgcccggccatcagctgcgcaaaacatgccaaagctgccgccgttacagctacccccagcaccccgaaaagcagaaacgaaagaagctccgccgggaaacctcgagactcagacataacaaaaccgcctccctgcacatagtctatgcaggaaggcggttcatgtatgcacggtgtaaacgcttacttcttgtcggcaggagccttgtccatgttcagcttttcgaccgaagagatcgcagacttggtgaagcggatcttcacgcggtcagcgccggtctccagaacaaaggtgtcatccttgatggcgacaacgcggccaatgacaccaccgatggtggtgacctgatcgccgatctccagactgctgcgcatagcggcatccttcttttcctgcttcttctgaggacggtagatcatgaagtacagcaggaccagcatcagtgccagcgtgaagaacaggctgatatagccttcggacgtggtagtcagaaattgcatggggcaaaatctcctctcaaaaattcagataatgctattataccctcttatcagccttgttgcaaggctaaagtttaaattcgggtatccagaagtttaacgtatctgtcatggaaggcggtaaaggtgccggcatccagttcgtcccggatacgttccatcagatgattgtagaaccacagattgtgcatcacggtcaggcgcatacccaacatctcatctgccttgagcaggtgccggatgtaggcgcgggaatagttgcggcacaccgggcagccgcaggcgggatcaatgggacgctcgtcccgctcatacttggcattcttgatgttaatgatgccgctccatgtattcaggtggccgtggcgggcattgcggctgggcataacgcagtcaaacaaatccacaccacgggctacggcctcgatgatgttgccgggagtgccgacacccatcagatagcggatcttgtccttgggcatgtgcggttccacctgactgatcatctcatacatcacttcggtgggctcgcccacagccagaccgccgatggcgtagccgtccaactccagctctgcaatctgcttcatgtgctccacgcgcaggtctgcataggtacagccctgattgatgccgaacagaagctgatccgggttgaccgagataccctcgtgcttcaggcgtgccatttcggccttgcagcgcttcagccagcgggtggtgcgttcgcagctgtccttggagtaatcgtgctgggcggggttctctacgcactcatcaaaggccatggcgatggtagagcccagatttgcctgaatctgcatgctctcctcgggccccataaagatgcggtgcccgtccagatgggaggcgaaggtcacgccctcctcggtgatcttgcgcagctttgccagactgaacacctgaaatccgccgctgtcggtcaggataggcccgttccagcgggtaaacttgtgcaggccgcccatatccgctaccagcttgtcgccgggacgcagatgcagatggtaggtgttgcacagcatgacctgcgcgccgatatccttcagatcctgcgccgacaggccgcccttgatggcaccagcggtggcaacgttctggaaggcaggggtctgcaccgtgccgtgcacggttttgaactcgccccgccgggcgctgtgctcctgcttgagcagggtgtaagtcgtcaaagaaggcatgattattcgttcctttctgcgcacggaaaacagccgtgcagcctcgatgcaggccacgagcctgcaagttatcagaatgatcacagcagcggtctgccgtaattgtaaagggagcggcggatgcagatcgcatccttacctttcacatacaaatatcgcaaaaagcgcgaattttgtatcagactatcagcatagcatcgccaaaggagaagaaacggtacttctctgccacagctacctcataggcgtgcatggtcttttcgtagccgtacagggcggacaccaacatgatcagggtgctctccggcagatggaagttggtgatcagaccgtcgatgcagttgaacttcacccccgggtacaggaagatggaggtgttgccgctgcaagccttgatctcgccgtacttggcagcggcagcctccagtgtgcggcagctggtagtgcccacagcgatgacccggtggcctgcggccttggtctcgcggatgcgccgggcggtctcctcgctgatggagtaccactcgctgtgcatcttatggtcggagatctcgtcctcctgcacaggtcggaaggtgcccagaccaacgtgcagggtgacctcggcaatgccgacccccatggcgcggatggtgtccatcagctccggggtaaagtgcagcccggcggtgggagcagctgcgctgcccagctccttggcatagacggtctggtactggctctgatcctccagctgctttgtgatgtagggcggcagcggcatcttgccaaattcatccagcttttcataaagcgtttcggtatcataatagaatgtaacgtacttgttgccgtcctccatggtctcgtccaccacagcggtcaggctgccgtcgccaaagcttacctttgtgccgggctgcatccgcttgccgggctttgccaggcactcccactggtcgcccttcacctgccgcagcagcagcaactcgcatacggcaccggtaggttgcttgacgcccacgatgcgggcgggcagaaccttggaattattcaccaccaaaagatcccccggctccagaaattccggcaggtcgcggaacaccttgtgctggatgctgtcgtccttttggctcagaaccatcagccgtgccgcatcccgcggggacgcaggttcctgtgcaatgagctctttgggtaaatcataccaaaaatctttttttaacatactgtgcatttgcctttccgatgattgacacggacaacgtatcaatgatattatagaatctgtataaacagtatctattatattgcatcgctgtccggtttgcaagccgtgttgtgcacaatgataagatttgctgtttgtttttttgaaaggaaaggtgctggaaatggatagacagtataaagtgggtatcgtaggcgcaactggcatggtgggtcagcgttttgtgactctgctggagaatcatccctggttcaaactgaccgtgctggctgcatccggccgcagtgcgggcaaaagctatgaggatgcagtgggctcccgctgggccatgactactcccatgccggagagcgtgaagaagatgaccgttctggacgcttccaaggtagaggaagttgcttcgcaggtggattttgttttctgcgctgtcaatatgcccaaggacgagatcaaagcactggaggaagcatacgccaaggcagagtgcccggtggtctccaataacagtgcccatcgtttcaccccggacgttcccatggtggtacctgagatcaatgccgaccatatcgagatcatccctgcccagcgcaagcgtctgggcaccaagcgcggtttcatcgccgtcaagtccaattgcagcctgcagagctatgtgcctgccctgcatcccctgatgaaggactttggcgtgagcaaggcgctggtgtgcacctatcaggccatttccggtgctggtaagacctttgaccggatgcctgagatcgtggacaacgtgatcccctacatcggcggcgaggaggaaaagagcgagcgcgagccgctgaagctgtggggccacattgagggcgaccagatcgtcaatgccgagaagccggtcatcactgcacagtgcttccgtgtgcctgtttcggacggccacaccgcagccgtgttcgtaagctttgacaaaaagcccaccaaggagcagatgttggaagcttgggcgaacttccgcggccctgcacaggaactgaacctgcccagcgctcccaagcagttcctgcactactttactgagccggatcgtccgcagcccaagctggatcgcaacaccgaaaacggtatggcagtgtgcatcggccgtctgcgggaggacaccctgtttgattacaagtttgcctgcatgagccacaacaccctgcgcggtgctgccggcggtgctgtgctgctggccgagctgctggcagcaaagggctatatggactaatgcctgaatttttgcgcgatacacgcagcaaaggagttttttactatgaagaagcctgtctttaccggtgcgggtgttgctatcatcaccccgatgtacgaggacggaagcatcaactttgacgagttgggccgcattatcgaggatcagatcgcccgccacaccgatgccatcatcatctgcggcaccaccggcgagtgttctaccatgaccgacgaggagcagctggccgccatcaagttcaccgtggatacggtcaatcaccgcgtaccggtcattgccggtgccggttcgaacgataccgaccacggctgcgcactggcagcaaagtctgccgcctgcggtgccgatgccctgctgatggtcaccccctactacaacaagacctcgcaggccggtctggtggcgcactttaccgccatggctgaggccggcggcatcccggtcatcctgtacaatgtaccctcccgcacgggtctgaacattgcacccgagactgctctggagctgagcaagcacccgctcatcaacggcatcaaggaggcctccggcaacatttctcaggtggccaaggtggctgcactgtgcggtgatgcgctgaacatttactccggtaacgacgatcaggtggttcccctgctggcactgggcggcaagggcgtcatcagcgtggtgtccaatgttgcgccggaactggtgcataactgctgtcaggctttctttgacagagataccgccaaggcctgcgctttgcagctggaaatgctgccgctggaggaggctctgttctgcgaggtgaaccccattccggtcaagtatgccatgaacgtgctgggctggaacgcaggcgaatgccgtctgccgctggtagagcccagcgatgcccacaaggcaaagatcgagcaggctctgctggctgcaggtctgatcaaggaataacaacagcgtacagaatgcccgggatcttcagcttccgggcattctgccatattatagaaatgaggaaacagcaatgacagagatcgtgattcagggtattggcggccgcatgggccatgtgctgtgcgatatgatcgcacagcgggaggactgctgtgtggtggccggtattgatatgaaggacggcgagcaaaacggcattccggtctacgacagtctggaaaagctgaacggcaagggcgatgtgatcatcgacttcagttcccctgccgcagtggaaaaggcattgccctactgccagacccacaagctgcccatcgtggtgtgcaccaccggcctttctgaagagctgcagctgaaggtagtgcagctgtcccgcagcgttccggtattcaagagcgccaatatgtctatgggcattaatgtactggcagagctgtgcaagcgcgcctctgctgtgctgggtatcaactatgatatcgagatcgtggagcagcatcaccacaacaaactggatgcccccagcggaacggcactgatgctggccgacgccatcaacgaggaaaataacggcgcgtaccactatgtgtacgaccgttcctccgtgcgccagaagcgtgacccgaaggagatcggcatcagctctgtgcgcggcggtagcatcgtgggcgaccacgaggtgctgttctgcggcccggacgaggtgatcaccctgcggcataccgcctattcccgcagcatctttgccaacggtgcagtgaatgctgcggtctatctggcaaaaaaagagccgggtctgtacgatatgggcgacctgatcgccgccttctgaaaaacgagctgccccggcatacgctgggagaagaggtgaacgatgaagcaggagcctttaaagcggcggcgtccggctgcccgtaagcgcggccaaaaacaaacgctccaggcggtggtgctgtcggttctggctgtgagcgtgatagcattgtgtctggggatctggacaaggctgccgggagaagatgtaccggtgggcggcgtcgagccgccggaggaggtgttatcccctacttcatctgttgtgacccccgagccggaacctgaaccgcagcctgtggtggaaaccatccggttttccgcaacaggagataacctgatccattcacccatttataatcaggccgcccgccgggcaggcgaagacggaaagtacagctttgattactgctatgagcacatcgctcctttctatgcgaaacaggatgtgaactggatcaatcaggagaccctttgcagcgacacccttgcaccctccacctacccatgcttttccacccccggcgactgtgcgcgggcgctgtaccgtgccggggtgcgggtgttcagcctgtccaataaccacacctatgataagggcgcgtccggcattgcggctactctgcaattctgggagtccatgccggaggatgtagtcaccaccggtctgtggtgcggcgaagaggactacgaccgtatcccgctgcaaaccgtcaatggtgtgaccatcgcctatctctcctatactgagcacaccaacggcatccgccagaacaagaatatgacagccaatgtcatctacaccagccagaccgatgtgatcgagcatcaggtgcgcttggcgcgtcagcaggcagattttgtggtggtgggagtgcactggggcgtagagaacagccacgccgtcgtggacagtcagcgcacactggcgcagaatctggcagactggggcgcagatgtcatcgtgggcacccatccgcatgtgctgcaggatgcccagtggctgaccgcagcggacgggcggagaagttttgtcgccttctcgctgggcaatttcctcagcacccagagccacccggatcagttggtgggtgcgatcctgaccttgcagctgcaaaagaccacccagccgaacggctcggtgcagtgtgaagtgcttgcgccgcagctgcaccccaccgtgacccattatgatgccggaaaaaccaatgtgcgcacctaccttttgcgcgattacacgcaggaattggcggcagcgcatggtgtgcgggcaaattattctgatttcagccttgacaggatacaaaaaatcgcgcaaaataatatcagtgcatcctttttagcacttacataaaaatgtgaaatgattgagcgttgtccggcaacccgggcagaacggaggactttttatgtacggagtatcgaagatcaatatcgagaccgacctgatgatgatcagcgtgcaggacgtagtgttccggggcaacagtctgtcccggtatctggatatctttgcagagaccggcgtggtggtggatatgatcagccagagcgctccccacggcaccaccattgattttagctttaccgcatccagcagcgatttgccgctggtgatgaaagcaatctcggcagcaaatctggataaggacgccaaggcttctcctctgatcagtgtgggttactccaagctgaacctgttcggcgaggatatggtcaccagctgcggtgtggctgcgcgggcgctgaatgcgctggctatggccggtattgaggtgctgctgatcaccaccagcgatctggatatttctctgctcgtccacgcggaaaacgaggacgccgcctatgaggcactgaaaaaggcatacgagctgtaaaagcataagccggggccgaggggacagcttccctttcggccctgtttttgcgaaatgcgtagagacaagaaaaacaccgccacggcggctcctctgccgaaagaaggaaaaacggaatgaaagaacctgctactcttatgcacagcatccggcagcgactgctggcacattttgagaaaagtgcgctatttgcccctgatgacccagcaatggaagctgcgcctgcggacagcgggcagttgctctatgcaccggtctcaggacgtatccgcgcactgacccggatcaaggaccctgtgttctccagtgaggtgctgggcaagggctgcgctattgagcccagctgcggcgaggtggtagcacccgcagacggcatcgtgaaaaagatcgccaagacccatcatgccatcagtttgctgtgcgacaacggcatggaggtactcattcatgttggcatggacaccgtggagctgaagggtaagggctatgagctatttgtacagactggagaccatgtgcagaagggccagctgctcttccggttcgatatgcaggccattgcagcggcaggctacacgctgaccacccccgtgatcgtgaccaacagcagccggtttgcacggatagagcctttgctctccggccgggtgactgccggacagcagctgttgcgcgctaaaatgtaaaaaatgggccagaaacgcctacggacgtttctggcccataaattttataatgctttttacagcgttaccttgtggtagatctttttgcccttcttaatgacgatgcccttggccaactgttctgcggtaaagctgacagtgggagcagcgactttttcgccgtctgccaacacaccgccctgtactaccagacggcgagcctcgccgttggaagcagccagaccggccttgaccatcagggtcagaatgccgatggcaccgtccgtcagatcagcctcggtcagctgggtgctgggcatgtgctcggtatccattgcgttgccactgaacagtgcgcgggcagcattctgagccttttcggcctcttccttgccatgcaccatgctggtcatctcgtaggcaagaatctccttggcctcgttcaggcgctgatcctgccaagtgctcatctcgtcgatctgctccagcggcaggaaggtgagcatacggatgcacttcatcacatcggcatcgcccacattgcgccagtactggtagaactcgaagggactggtcttgttggggtccagccagacagcgttgccggcggtcttgcccatcttcttgccctgagagtcggtcagcaaggtcacggtcatagcgtaggcatccttacccagcttgcggcggatcagctcggtgccacccagcatattgctccactggtcgtcgccgccaaactgcatattgcagccgtagtgctggaacatgtagtagaagtcgtagctctgcatgatcatgtagttgaattccaggaaggacaggcccttctccatgcgctgcttatagcactcggcgcgcagcatattgttcacggagaaacaggcgcccacctcgcgcagcaactcaacatagttcaggtccaacagccagtcggcgttgttcagcatcagagccttgccctcggagaaatcgatgaacttctccatctgcttcttaaagcaagccgcattatgggcgatatcgtccttggtcagcatcttgcgcatatcggtgcggccggaggggtcgccgatcatggtagtgccgccgccaatcagggcgatgggcttgttgccagccagctgcaggcgcttcatcagggtcagcgccagaaaatggccggcagtcaggctgtcggcagtgcagtcaaagccgatgtaaaaagtagccttgccgttgttgatcaggtcaatgatctcctcatcggtgatctgggctaccagaccacgggctttcagttcttcgtacagcgtcatggaaaaaacctcctgtttttggggcagaggaaacaaaaaacgccctctgccaaaaatgaatttggcagagggcgatataacttcgcggtaccacctctgtttgccgtttcctcacggaaacggccttacgagtgcgcaccccagagtagagcgacactcctgcgtctttaacgctcgcacgcggcacagcctactagccttacgcattcagcctgcggctccgggaggtatttcccctgccgttctgtgatcccttgcaccaaccgggacttctctggacagaacacttcagggtacttgttcccttcatcgccattaacattgtctactctatcacaagaccgccgccttgtcaagagctgtcctttctgcaaaaatgcattccgctgcatcatccgccgtgcttgcgctcctgcagcatttcccgtgcattggcgcgggaaagctcggtaacgtggtcgccggagatgaggcgcgccaaggcctctacacggccattttcatccaacggatggatctcggtataggtgcgctcgttggacacatttttctggatgagcagatgacaatcagccagtgctgcaatctgcgccgtatgggtgatgcacaggatctgatgcccttgcgcactctgacgcagcacctcgccgatgcgtccggcagccttgccggacacaccgctgtcgatttcatcgtagatcacggtaggcacggcgtccttatcggccattgcatttttgattgcaagggtgatgcgactcagctcgccgccggacgcgatcttggccagcggcttgggtgcttcaccggggtttgttgagatgtagaattcaacgctgtcctgtccatggctggccagcggaccgcgggtatgccgcaaggtcatacgcacacccggcatattcaaaaagtccagcgtgccggaaatgcgggtgttcagttcctcaaaggccttcagtcgggtctgggtcagaacctctgctttttcccgcgcttttgtgtaaagacgcagcttttctgcctgcaatgcatcatagcgctgctgggaatgctggatgttatcaagctcttcccgggccttttgcccgaaagcgatcacgtcctccactgtgctgccgtatttgcgcttcagccggtacaaaagatccagtcgctgctccacctcgtccagttctgcatcgttggtgtcgtaggtgtccagccgcccgatcagatctgcggccacatccttggcgttatagtataagtccagcagctgcccggcggcggctgtaagcgcagggtctaactgcgcagcggcatccaccgcgttggaggcttcccccagaagatccacagcgcctgcggcatcatcactgccggaaagcagcgcatagctttgcgccagccggtcccggatggcagacgcattggacagcaccttccggcggttttccagcgtctgctcctcaccggcagtcagcccggcatcctcaatctcctgcacctgatactgcaacaggtcgatcttgcgctgcttttcagcctcgtcagtgatcagagcatccagctcccgcttgacccgcaccagctcccggtacagggtatagtactcttgaaaaacagtgcggttctgcgcataatcgtctaaaatgcccagatgatgcgccgggttgagcagacccaccgaatcgtgctggccgttgatgttgatcagaccgccgcacagctcccgcagaacggctgccgtagccggcattccgttgatgcggcagctgctcttgccctcggcggtgatctcacggctgagcagcagtgcttcggagcgctcgtagccggactgctccagcttatccagcacagcaggcggcacctgctcaaaggcggcgcggatcaccgcctttgcagccccggtacgcaccaagtccttagaggtgcggttgccaaggatcgcattgatggagtcgatcaagatggatttgcccgcaccggtctcgccggtcagcacattcagccccggttcaaagtgcacctctgccttctggatcacggcaacattttcaatttgcaggctgctcagcatggcttcgttctcctaccgtcatctctgccccacataacgggtcagctccgaacaaatggttttagcatcgcgctccgagcgcgcaacaattaaaaaggtgtcatcaccggaaagagtaccgacaacgtttttccactgtaaagcgtcaaaaacctcgcaggcagcattggccatgccggaatagcattttaccaacacaacatgtccggcgtaatctacccccagaacggactcgtggaagatggtctcaaagcgcccttgggtcttgggattgaagctttcgttccggctggaaacatagcggtagccctcggtggtggctgcctttacaaggcacagctcccggatatcgcgggaaacggtggcctgcgttacctcaaagccttcgttccgcaggtgctccagcagcacctcctgtcggctgatgggatgctcctgcacaagacgtaggatcgtctgcaaacgttccgcttttgtttttgtatcttctttgcggctgcgtgccatcttaaaaatcgcctcccgtgttattgtcttttgcgcagtttctggtcaatggcctgaaactggtctgcccgcccaaaggtaataagcttgacgttctgatcggacaggcggatctctgcggtggcacccgccttgagggggtagcccataccgccgtcacagctgataaatacttcatcgtctgctacctgccccacacagacgttcagcttgcgctcctgcgcaaataccatggccggactggccagactgtggggacagatgggggtcaccacgacgcccttggtctgagaatccagtatcgggccgccggctgccagcgagtaggccgtagagccggtgggggtcgccacgataacgccatcgccccggtagtgctctaccagaatatcatcgcagtaaatgctgaagtcgatggcctgttgcaggcgtcccttggtcacgaccacatcattgagggcgtgcccctcccagccgtcctgaccaagcacccgggcgtataaaagcatccggttgtccagctggaaatcgccccgcgccacagcggccagctttgtttccatttcgccgatctcgcaggtagccagaaagccgcagcgtcccagattgatgccgaggatgggctttgcgtaccgaagcgaaagattcgcttcgtgcaagatggtaccgtccccgccaatggtcaggatcacgtcagcacgcttcagacaccgctccagcggcaggtaaatgacccctgccgtgttgcagctttcccgcagagcatcgctcatcagtacagctgcgccgtgggtcagcaggatctgcgccgcacgcagcgcgatctcgctggcagaggtcttgcccggattgggcgaaatgtagaccgtcataccggtttctcctttgctgacagttgagtctcagcgatccagcgtggtgtggcttgctgccaccacctgtgcggcggcttcgtcgtccagcactgcgggctggtcgctcttctgcacaaacatcaggtactcgatattgccttccggccctttgaccgggctgtaatccaacccgcgcactacaaagccgttttccgcagcataagacatggcattgtgcaacacctcacgatgcacggcagggtcacgcaccacgccgtttttgcccaccttctcgcggcctgcctcgaactgcggcttcaccagacagacgcccatggcgtccggggtggtgatgcgctgtgccaccgggaagatgtgatgcagagaaataaaggaaacatccacactgaaaaattcaatgggctctgcaagatcctccggcgtgacatagcggatgttcgtgcgctccatattcaccacgcgcgcatccgtccgcaggctccatgccagctgaccgtagccaacatctacggcatacaccttcacggcaccattttgcagcatacagtcggtaaagccgccggtagatgcaccgatgtccatgcagaccttgccgttgggggtaagcgggaagcacttcatggccttttccagctttaagccgccgcggctgacatagccgatatcgtggccgcgaacctcgaccacagcgtcctccttgatcatctcgccggccttgtccaccttttgttggttgacaaaaaccacaccggccatgatcagagccttggcgcgctcccggctctgcacaaggccgttctgcacaagatattgatccaaccgaattttcacagctcgttttctcctttcgtgagggcagaccggactgcctgcacaagatccgcagcgtccagaccggtgcactgcttgatctgcggaacagtcgcgtgcggcaggcaggccgtgtggacagcgcagtgtaaaaagcggccgttccagcctttttgctgcaaagcatatgccagatgttcaccaataccaccagctgcaacacattcttctgcaaacagtacgattttatatttcgacacagtatcgataagtttatctgtaaaggggtatagctttacaagcctcagaacgtctgtattctgcgatgcagcgttcaattgattggcggcctccaatatgtcctccagttcgtccgcatagctgaccagaagaatctctgccccgggcgtttcatacaaaaagtcgtattcccgctttgtgcagggatactgcgccagttttgcactctcgccgccgcgggggtagcggatggctcgagggccggagaccgtgtcctgcagcaaatagtgcagccagtattgcagttcctcgtaattggagggtgcatagaccgggatgccgatctggctgaggaaggctgcatcatagatgccctgatgggtctcgccgtctgcagggacaaagccggcgcggtcgatggcaaagaccacattctccttcaacaggttgacatcgtggatgatctggtcataggagcgctgcaggaaggtggagtagatgcacaccaccggcagcattccctgactggcaagaccggccgcaaaggtgacagcatgctgctccgccatgcccacatcaaaaaagcgctgcgggtgacgatgggcaaagaattgcagtccggtaccgtacttcatggcagcggtgatcgcgcagagcttcgggttttgtgttccctcctgcaccagcagtttgccgaaaacagtggagaaagattccttcggcgcaacctccgggtccggcattccgtccgggtcaaaagcagatacaccgtgatagtttcctgggttcatctctgccggctgataacctttaccctttttggtcacaatatgcaaaaaatggggacccggccgctgatagatcgagcgcaaggtgcgttccagctcctccacgttgtggccatccaccgggccgatgtattcaaagcccatatcctcaaacatagtggagtggtacatagcgcggcgtaccagcgtttttgcgccgatcagcgattttttcatcggcgcaccaatcaatggcacaccgtccagaaaactgcgtacattatccttggcatcataatacgccgtagttgtgcgcagatgggtcagatatcgtgccagtgcaccgacatttttagagatggacatcttgttatcgttcaagatcacgagcaggttgtccagcccgccgatattgttcatcccctcatacaccatgccgccggtaaaagcgccatcgccgatcaccgccaccacaagcccgggctcatgcttgatctttttggcccaagccataccaatagcgagtgaaagcgccgtattgccgtgtccggcaataaaggcatcgtgcacactttcgtgaggatttggaaagccggaaatgccatccagctgccgcaaatggtcaaactgtttccggcgtccggtaagcagtttgtgggtgtagcactgatgccccacatcaaaaacgatcttatccttaggcgtttccagcacacggtgcagcgccacggtcagctctacggtgccaagattagaggccagatggccacctgtcttggagatattttccagcaaaaaatgccgtatctctgcgcaaagtttttccacctgctgcgcattcagctttttaagatcgctgggctgatcgatcttatccagcaacaacgattccatattcacacatcctttatgtgtttgtactttgggcgtctctgccgccttttacacgaccgggaacagaaagcctaccagggagccgagcagtacgcccgccacgacctgcagcggcgtgtggccgaccatttccttcaggtgcatattctgcaaaaagggagcgtttttctcgcttacatcgatccactgggcaatcatctggttcagcacctttgcctgttcaccggtctcgtgccggacgcccatggcatcgtgcatggtgatgatagccaccacacaggccaccgcaaaaatcggcgaggcgaccccggcgctgcgtccggtaacaatagccatggcgcagacggtcgcgctgtgtgcgctgggcataccaccatcgccccacatccgctctaactggaacttacccagcagaataaagttgatgatggtctttagcacctgtgcaatgaaccagctaagaagcgatgcggtcaagatctgattggctgataagatattttgaataaactgcatatctgtattcctttttctttagtttttgcgcaccagaagctgctgagccagctgctgcaaaaaagctgcctttgcaccaaaatgctgctgcagatcattgcagatctgctcgttcagcttttgcgccagcaccattgcgccgtctaccccatacagagtaacaaaagtggtcttgccgttttcgctgtcactgccgatgggtttgcccagctgttccggggtactggtaacgtccagcacatcgtccacgatctggaacaccagccccagcccgtatgcgtaggaggtcagtatctcgcactgctgcggtgttgcaccggctgcggcagcgcccatctggatggcggcattgatcagtgcaccagtcttgttgcggtgaatgaggcgcagctgctcctcggtggccgctagcgcttcatatttcagatccagctcctgcccgtagaccataccgcggctgcctgcacccgcgcccagcgcacgggcggctgccacgcagatctgcggcgtagcggaggcgtttgcaatcacctcaaaagcctcggtcagcagcacgtcaccggccagcattgccgtggactcgctgaaggccttatggcaagagggacgtccccggcgcagatcatcgttgtccatgcagggcagatcatcatggatcaacgagtagcaatgcagcatctccacagctgccgcgaactgtgcggcaacctgcatctcgccgcccagcatatcgcagacactgagcgtcagaatcgcgcggatgcgctttccaccgcccagcaagctgtaacgggcagctctgcatacttccgattcctcgggcagaaaacgagcgccggcagcatccagcgcagccgtagcctgccgcagatattcctgatattgcgccttatattccattattcttcctcctgctcctgcggggtgtccacggtctcggcgatctttgcactgatttcctcgatctgcagcgaggttttttccaacgttgcatggcagtactgcatcagggaggcagcttccgcatacaacttgacggaatctgccagcgaggtgtcctcctgctgcatctgtacaagaatcgcgttcagccgatccattccttcttcaaagcttttgggtgctctcattgatctcctccaccgtttccacacggcatcgtgcctgatattgccgactgcgcacacagatgggctgctccggctgcagctgctccacggtgcagaccttcccttttgtatcggtcacaagggcatagccacgggccagcacacgatatggatccagcgatgcagccagtgcagctgcgtgttgaagctgcatatttttgtcattcatacgcgttttttgttgtgcctgaatggcctgctgcacctgttgcaggcggcttgaatactgctgtaagattttgctcggcgcgctctgctccaacaaaaagttgtattgctctagaccattatagcacaacgcaagccgtttttgtatatttttgtgaatattttcttcaatattttcaaaaatgcgctgctgttcctcccgatccggcaccgcaagctctgcggcagcggacggtgtgggagcacgctggtcggctacaaagtccagaatggtgtagtcgatctcgtgtccgatggcactgatcagtggcgttttgcagcgaaatgctgcccgagcaatctcctcagcgttgaacacccacaggtcttccctgctgccgccgccccgggctacgatgatctcgtctacccgcccgctctgatccagcgtgcagatggcggcggcgatctgccgggcagcctcaaagccctgcaccgttaccgggcacagcagcagccgaacggacggccagcggcggctgatcacgttgcggatatcctgcaatgccgcccctgttttgctggtgacgacaccaatacattcggggtatgcaggcagcggctttttgtataccgggtcaaacaggccttccttttccaaccgggccttcagctgctccagcgcaagctgtgccgcgcccagaccatccggaaacatctcgtttacatagacctgaaacgcaccgtcccgctcgtagagggtagcgcggcagcgtaccacgacccgcatcccctcctccgggcgaaacgccagacggcgggcatcggtgcggaacatcaccgcctttacgctgcaggcatcgtcccgcagagaaaagtagcagtgcccgctgcgggcgttctgcacaaaatttgcgatctcaccccgcagggccagatcgaacaacccatcgttgacatccagcagcgttttgacataatgattcagatcggataccgagatcacatcagccatagaccggcctcccgcgcagcaagaatggatacgccgatggcattatcacttgaatactgccctggcacaaaatagacctgcggcaaacgctgctgcacccatgtgcggatgatatcgctgctcatcacaccaccggcgcagaccaccggcagaccggggtattccttctgtgcagcctttgtcatgcggacaacggtatctgccacgcagagcaagcagtacttgcaaacgtattccggtgcttttccggccgcaagcagggcgttacactgattttccagcccagaaaggctgcattgcagcccctttacgctggacttaggccggatatcctcggcgcactgcgcagcaaggcgggagacctctgcccctgcggggaagccaaagcccagccgcacgcccacgcggtccaccgcctgaccggcgtacagatcggtactggtgccaagggtggtgatagcacgcacctgatcgcacagtaaaagatccgtggtgccgccggagatatggaacaaaagcaccttctgggagaacagtgcctcaccctttgcggcatacagcgccgcagcagcgtgaccctgctgatgggtagtgtggatcagcggaatgtcccgtgccgccgcaaaggcggtcgccgcactgacaccagccagaaaacagggcatatagctgccctctaccgggcgcggcttttgcgaaacacctacggcatctatttttgtcaggtcgaattcctgcgccagctcctgcagcatctccggcagagctgctgtatgatggaacagtgcatcgctttgccggagaccaagctgcccggcttttaccggcaaaaagcgcttttttgcacaaacaacctccccggctgtatcaaaaactgccagagaggttgcatagttgcttgtatcgaccccgagcgtataacggctcactgttcagccgactccgcgacggcttcatcactcaggccgtggtcgcgtgccacagcacccagcaggccattcacaaattggtagtcctcgcccgcgccgtacttcttggtcagctccacagcctcattgatggcaacgccgggcttgttctcgccgccgaacagcatctcggccacggccagacgcagcacagtcaggctgacgcggggcagacgctccatagtccagttgcgcagatgggagcggatctcgtcatccacctctgcggaatgatcgtagtaggcgttcagcaacagacggctgaaggcgtccacgggatgctcctcgtcgttctcagcgtggttggacagtgcctcggccagaggaatgtcaccaaaggtctgcgaaaatgccagcaaaaaggcgttttcacgggcttctctacggggcagaatgttttccataatgttcctttcgcaatacaaaccctccccgccgggcgtaccgggaggaggatcgtttctgatatgattttttgctgaatttgttactgcgcttcggcaaggcctgcaatgaccagatccacgcggctaaccgtcacattggtcatgttctgcacggcagacttgacgttctcctgtactttttcagccacagagggaatccgtgcgccgaactgcatcatcaggtgcagagtgatgctggccgtgccgtcccgcatctcaaccaccacaggcggctggatactggcagattccagcaggcttttcagctttttattctgcacgccgcaggacacctcggcaacgccgtccacttccagtgcggcgcagcgggcaatcttacccacgacctcggtcgaaatctgaaggctgccgccctgaagatccatgttctgtaaatccattgtgctgtcctccatccaaaggctgctcctgcagcggtttcaaaaccctgaaaccggtctgccgtgcctgccttttgtgttcaaacgcgcccttgtacagtgcataaaggcgcgcagcattcatttttgatagagttattataccatcaatgcgggggtaatttcaatacttgtttggaaaagaagatggaaatcagcatagaatggcatcccggcagcgcatacggctttctgcctgcaagaaaagctgcgcctgcgccgccgggatatccgcatagataaagagtgcttactttacctccaccaccgtgatattctgggcggtcacgctgcttttgttcatcaccacatcccggatctgtgccacctgcgccgccgtgagcggctcacccgctgtcatcacggtcaggtctgcccgccctgcttgcaaaaagcacaggcaatccgcaaagcccttggcgcgcaccagcgtttcgatctcgttttctgcgttcagatcctccagccctgccgccatttgtgcggtgtactcctttttctcctccgctgtcagggaggaggacttcaggctcttttgcagggtatccatcgcttcgtcgtgtgccttttcccgcttgagccgagcctgttcaaaaaagcgggtgccgctgtcgtttgctacgctgacaagctgtgcttcgccataatttttattgacaccggaggcggcctccgcctctgtgggcagcgcatccgtgatggcagtctccgcttctgcctccactggctctgccgagaccatgagggtgtcgtcctctgtctgcggagtaatgtctgcccgggcatactgccagtttaagtagacggcaatgaccagcgccgccgccagtgtcagggcggtgaccctgcgggtgtttctggaaagtgctctcataaaacgcttcctcctttgtttttgggtaaatagttttggtactcgatcaaagcagcagctcagcacttgcgttgctccacgcagatgcggttcgcgggcagatccaacagcgaatgcagcagctcagtaatgcgggctgcaacccggacatctcccccgccctcacacagcacggcaaccccgcagacctgcggcagataggtagtctcggccagcgcagacccatcctgtaaaagaacgtgcttctcctgctgttgcagatctccggtctgggtatctactgcatagatagtctcctctccggtggtcagggtgaccatgaccgtggtgcgtcctgccccctgcaattggctgataagctcttccagctgctgctccagttgggtctggtactggctgacggcagcagtccggacagtagatgccgcggttttctgcgtgttgccgctgggtaaaagttccgacagcaaaagcagcaacattgccatcacgccgaccgtcaccgccagcgcggtgcggtttttgttgttttgcaaagagcgtaaagcggaaagcaattcattcttcttcacggtgtgctcccctccgctgccgtgggagcggtgcccagtgtctgctgcaaaaagctaagcgctgcctgcttttgggcggcggtacagcccgccgggaaggcagcaacaaccttttttaccacgacctgctgcccggctttttccagcgtgaccgtcacgctggcatcaagcccgaactgctggcggcactgtgcggtacagtactccgccaaccgggtctctgtctcggtcaggatatccgtttccaatgtatccgactgcatcgcagacaggaccgccggggctgtgctccctgaaaaagcggtcaaaaccttgcccggcagccgtggcagctgcgcaagaaggactgctaaaatatataacccggctgcggcttttatgcaccggcctgcccagctttgcccagcaaaaaaactgaccagctccgccccgatgcacgccatgcagaatactgccgcggcccgctgaaatgcctgcatctaaccaccccctgtcagcatcagcagtgcgatgcccaccacaaacaacataaaaaacaaggccgtaacagccgccatgcagcgcacggcttcggcaaagcattgcagcagcttatggcaatactccagcccgccgatcccggcaagccagccgcagcaggacagaaaaagcagatgtatcagcagcccgagatacaagggcgcaaattctgctccaatgctgagcaatgcggcaatgccaagggtgcttttgagcaactgcatcccggccagcactgcatctgccgcgttgctcagcgcctgccctacaatgggcacactgccggtcagcagctgtcccagacgggaggctgaacgatccagctgcaccgtgactacgcgctgaatgctcatcagagcggcgaacgctttgcctgcccagccgatggcctgccgcagcagccgcccggtcagagtgcagccctcgaacagacttttgcgggaactgatgccgcaggccatgctgatggcaaggtagctgcgcagcagcggctgcagccagagggtgaccgcctgtgcgataaaacacagcaccgtgagcagaaagccgtttgcagccgctccggcgttccattcaccgccagctgccaacacgccgctgtataccggcaaaaagcccagcagataacttttccacccggccatccgggtgcacagggcagcggcaagcttgtccagctcctgccacaatagaacgccgcagccgccggcagccgccagctccagcagtgctctgtcggcagtgtcctgcaagagaaatgcaagtccagctgccagcgacaaaaacagcagaacatcggcatattgttgcatcgtatcccgcagcaattgcaccggttcggcggcaaacaaacgcacaagggtgccaagcgggtctgccgcaaactgctcggcctgtacaggtgccttgtcgagataggtttgccacggtgtggcttctgctgccgcagctttcagagcggttttgctgcacagaaaacccagcgttgccatgcaaatgataaggccgcattttttcatcctgccaacccccagatcgtctggaatatctgttccagcagcggccatactgctgccagtacgagacaccgccccgccagcccggcgcaccatgcaagagtacctgctcctgcttcctcgcagagggtgcggacgtaatctgccagcaacaggatgcccgcgctgcgcaaaaggcaggaaaaggcttgcgcattggtgcgctgccccagctgtaccattgcttgcagtaccccgcgcagcggctgtgccagacggagcagcagccacaccgcagcacccagcgaaagcagcaacgcaaatgccggggaataccgctgcaatagaactcccgcaaaggccatcagcagcagcgcagtcagcaccggaactgctgcgctcatagcgcgaacagagaccggatggtggcaaacagggtgctgatctgcttgacgagaatggaaagcactaccacaagccccgccaatgtggtcatcatggcctgatcctcccgcccggagcggatgagcagctgattgagtactgccacgatgatgccgatggccgcaattttgaacacaagttcgatatccatccgtttctcctttgttctgtacagcttttaccaaaagagcagcgccagcatcataccgccagccaaccccagacggtgcggcaaaccggcctgccgctgtgctgtgcggcgtgcctgctgtaaatagtcctcaaaccgcgccgtatagtaacccagccgctcgcattcctgtgcggtctctgcgcggccgattccgctaaagcactctgcaaagcaggcacgctcctctgctgaaagctgccacggtgcaggcaactgctgcaatgtaccgccggaattttgtggcaaaaggccctcgcggcaaagctgccggtagaggctttgcagatctgcccggcggtactgtatctcctgccggatgcgctgtaataacgcgatggtgccctgcaaggcggcaaggtgcagacttgtctgagcctgtaccgcatcccccgccagccagccgcacagcgggagcaaaagcaggccaagcccgtgcagaaggccgctcatacggcgcacacttcccggatgcaacccggtgcctcccgcccggcaaggatgaccagctgccgcagcatcccgcgctgcaacaaagcctgcacctgcgggcggcactgcgcctgtgcagcatccggcgcgtggatactggcaataaaatccaccccgctgaaaaagccctgctccagtgccatcgtttcctccagactgccaaactcgtccagcaggatcacctgtggtgccagcgtacgcagcgccatctggacggcgcgggctttatccaccccgccaatgcgctccagcggcggaagcggcccttccggcgggaaaagctcgccccgctcgtctatcactgccaccagacgctgctgctcggccagcgtccgggcgatagtgcgcagcagggtggtcttgccgctgccgggctctcccaccaccagcagcccggtaaagtgctgttccagcagcttgtccagcgcaggcggcaaagggataacacaactgcgtgcgatccgcaggttgagcgaagtgaccttttgcagagcgatgcactgcccttcccgctgcacgaactgccccgccacgcccacgcggttgccgacagcagtggtcaggtagccctcagcaagctccctttcgtgggtgtgcaccgagccattgcaaagggtgtgaaatatctcttctatttgcagcgcattcagccttattgcagccagctttggagggcagcccggcagtgccgaagcagggcattgccgcccctgtacggtaaatgtgaccgcacagccagtgcgcagccgcagctcctgtatgcgcactgccgtttgtacgggcagctgtgccagcggcgatgcaagccaagcgggaagggctctgacggcccggtaatactcgtccactttggtttctccttccacgaaagctttgtgctagcattgtatgcgctttgtgcgtcattagaaccgggaaccgggaacgggtaaacaaaaaagcccctgcaacagcgttgcagaagcttttgaaattacttgtattccaacatttaaaagggcgctttaagtcatttcctgttctaccggagcatcctgcagcatagcaagaaattcctgctcggtcagcaccggcacgcccagcgcctgtgccttggtcagcttggagcccgccgctgcaccggccaccacataggccgtttttttggagaccgagccactggctttgccgccgtttttcacgatcagcgcctcggcttcgttgcgggagagggtctccagcgtaccggtgaccaccagcgttttgcccgccagtttatctcccttcggctcgcccttccactgcatattgacctcggcatctgcaaggcgatgcaccagatcggtggtgccttccttggcaaagaactccaccacactctgcgccatcacgcctccaaagccgtcgatctcgctgatctgctcagcggtggcttcccggatggcctgcagtgtgccgaaatgttctgccagcagcgcggcggccttatcgccgatgttgcggatgccaaagccgaacaaaagcttatccagattgttctgcttggaggcggtaatagcttgcagcagattgtccgcgcttttctccttgaatttgtccagctccagcagttgttcccgggtcagcgtgtagatatctgctgcggaatgcaccagttccttttccaccaattgggtggctactgcctcgcccaagccctcgatatccatggcatcccgggaggcaaaatggatgatattgcgcagcgcctgtgccgggcactccgggttcacgcagcgcagggcagcctcgtcctccaagtgcaccaccggcgcaccgcaggaggggcagaccgtaggcatggtgtagggttcagccccctctgcatgatgggtgaccccgatgacctccgggataatatcgcccgccttgcgcacctgaatggtgtccccgatgcacagcccgaactgccggatgaagtcctcgttgtggagggtggcgcgcgctaccgtagtacctgccagaaacaccgggtcaaagcaggcggtgggggtaagcacgccggtgcgccccacagccacctcgatgctgcgcagggtggtctccttgacctccggcgggtatttgaaggcgatggcccagcgcgggaatttgttggtagaacccatcagctcccgctgcgcaaaatcgttcaccttgataacggcaccgtccatgtcaaagtccagcttggagcggttctgcccgatgttctcgatttcggcaatggcgtcctcgatatcatgcaccacatggtagcgcggcgataccggcaggccaaggctcttgaggtaatccagactttcggagtgcttggtcaaagtcttgccccggatctgctgcacattgaacacaaagatggaaagcccccggctgccggtgatgcgggcatctttctgccgcaaagaaccggctgctgcgttgcggggatttttaaagggtgctgcaccctgcaattcctgctcggcgcacaggtgctgaaaggccccgtggggcatatatacctcgccgcgcacctccaaaaactccggtgcgtctttaagggtcttggggatgctgcggatggcacgcacgtttgcggtaacatcctcgcccaccacgccgtcaccgcgggtggaggcgcggacaagctgtccattctcatactccaggctgcaggaaaggccatcgatcttgatctctacgacatactccggctctactccggcctcgcggacgcggcggtcgaagtcccgcagctcgtcaaaggaaaatgcatccagcaggctttccatcttaacggcatgggtcaccttgggcaacttgctactggcggttccgcctaccttctgggtgggcgatgtcgctgtgaccagctggggaaactgtgcttccagttccttcaattcccgcgtcagggcatcgtattcaaaatcctccagctctggcgcatcctgatcgtagtaaagccggttgtttttctcaataattgcgcgcagttctttcacacgcttttttgcctgttccagttccaaatattccactctcctgcgatatcattttgccgcccgccgtgctgctttcccggcagaaacagtgctgtacaccggacacagcagacgagcggcagtcgtttgcatttgcatcttccttagtataccacatccatggatggtctgcaaagcgttaaatacaaatcgtatttttgaagtgccctcatgttttgaaatcgatatcacggcatgttttatgttgattttaaatcacgcgcaaaagatactaaacgtatattcat

SEQ ID NO: 13837 - DNA, 83898 bp, Unknown
  gut microbiota DNA sequence
acttttagtaattctttgtactgcttttttctgtgcaggcacaggcaaaaagaatccccctccccggcgcggcagcttgtgccatccgggaaaggggtacagttaagtttgcagctcaggtggccgggatcagcaaccgctgtgcctgcggcagacaggcaagttcctcttccagctggtttgccgcaaggatctgcgccggggctacatggaaccgccgggccactgcaaacacctcctctccggcctgtgcgtagtagatacgcaaggcgatttcggggtcggtatcgggcagcgggtcgccaagggtgatgctgccgatgaccgggctggtggtgcagcctaaaatcgtgccctctgcccggacagtaatcgtagcttccagtgtgccgcccgcacaggtgcattgcacgttctcggtgctcagccaacattccggcacaagcaccgttccctccggcggcgtaatgggcagcgggacagcgacctccaaggttttttcgtagctttccagctcgccgagggtgttctctgcaagggctgttaccactgctttggcggcaagcacccaaccctcccctttttggacggcctgctgagggccatagtgcacaaaacaggcccgcagctgcgctcctgcatccggaagaggtccggagcctgtggcggtggcggtatcgttcagggtgcagagcaactgctctgtgacgagcggctgcggtgtgagttccgtttcaaaccgggtggaaaaagcatccactgccacttgcagctgatagctgcgccatgcccgcaggtgcagcatgacatttgccgtcagctgggcggcggcgctttctgcctgtgacagggtaaagcccaccggctctgccacgcataagcaacgacagtcctcggtgatgccctctaaatctattacctgctggaagggcagcgccgccgcctgactttgcagggccgtgtccccttctgcccgccatgcacactgcacccgcagttcccccttgaccacagctttaccggcaagcagctttacctctgccacacaggcgtttccggtaatatccagtacagccgcggggggctttgcaaagacaagctctccctctaaggtaaccagcttatccagcacagccacgcttcgcacaccttgcaatgtgcgcagctgctgctcgatgccgccatctgccagtgcggtgatcacctcggtcttgcactgggtatgcaccgtgaccaccagcccataggcgccccgcacctcgatacggcgcgggtctgccgcgcgggtgttgaggtactccgtctgcccttccaccacggctgtccatgccgtaaaggtaagctccggcagttccagctgccgggtgaagggcagcttttgctcggtctggcacaggtctttttctgcttcgctctggtaaaacaccgtgcagcgcagatagccctctaaggtaagtctgcccggttgcaactgccgctgcagaacaaccgggcggacaaaacacttgaccagcttacccaccggcggcagatcatccgagatgcggatatcggtctccagcggaagttctgcttttacggtacagcctgccccgccttgcggcagcgtatcccggaatatcttcagttccatgtgcagtgtgctcctttccctgtccgtttccgtaagagtgtatgcggcagcaggcgacggtatgccggcagtaaaaggccggtgtgcagcagctttgccacacaccggccttttttggattcagttctctttgcggatgccgaacagcttgcgcagaatgccgcacagcgctttcgggctgcgaatgaccactacctgcatctccaccccgcctttcgctcatgtttaccccattatagcgtctgacgggcaaaaatgttccgggaagaggtttaatctgcgatggtctccaccaccacaagcgcgccctgccgtgtgctgatggtgatgcagtccgatccttcggcatattcgttgctcacgcccagcggatagcctgctgtgagcacggcatcctctaactcatagaaggagcctttttcatacacgccctcggcgcgtccctccatggggaaggcggagaagtagaagaactcctccttgggatagcggcggctctcgcccggcagcacaaaggtgatgcgggagcgctcgtcctgcaaggcagcgcggatgccgcgctgctccagcccaaggccggtgcacaggtttgcaagggtgtgctccacccgcttgccacccagtgcgcccagcaaaagcacctcgtcaaagcccttttgcgccgcgagctttgcggcatactcggtatcggtgtcgtccttgacgtggggtaaaacgacgatatcgtccgcattctgctgcggacagggagcggaatcaaaatcgcctacaatgatatccggcttgcagcccagccgttcgcagttgcggtagcccgcatcgcaggcaatgataaaatcatcgctgcgcagcaggcgtttgagttccggctgcaccgggcaggcggaaaggatcacacaacgggacatctcattcttccttccgtattacactttcgggcgctgccagtccttgacatcctttacctcgtcgtacatggcacagtagctgtcgtaccgggtctgggaaagcttgccctctgccagcgcttcccgcacagcacagcctttttcgctgcggtgggagcagccggtaaactggcactgtcccagataagggccaaattccgggaaggcgtgctccagattctccttggggatgaacccggcacgattcgcctccaggctggcaaagcccggcgtgtcggcaatgcgtccgccgtaggcttcaaagatggtcacctcacgggttgtgtggcggccgcgtcccaacttctggctgatggcgctggtctcgcgggcagcgtccggcagcagcgcgttcaacagggtggatttacccacaccggagttgccgcagaaagcgcacaatctgctgttgatccactgctttacttcgtccagacctgcaccgctttcgtagtcgatgcggataaacggcagagtggactttgcataggcgtttgccagaaaatccgcctcggcaaggtcgcttttggtacacaccaccaccggctgtacgcccttatccaccgcaatggccgaaagcttatccagaaccagcgtactgggggtaggctgggtggtgcttgccacaagaaacagcacatccagatttgccaccggcgggcgcacaaaaacatttttgcggggctcgatctgcgcaatgaccgctgcgccattctcggtctccagcgtcacctcatcccctgccacgggggtgatcttctgcttgcggaagatgccgcggggtttgcactccacgatgccatccggcgtttttacatagtaaaagccgccaatgccttttacgatataaccgttcatgcatatcctccgtcagcccaacagcgaggaccaccagtccagaataccgccgcctgtggagctgctgctggagctcggctcgctgctgccgccggtgctctcaccgccggtagaaccttcgcccgtggtgccggaagtagtgccatcgccacccggctgctccggttcctgtaccggtgcagcgcccgcgctgaccacaacgtttacgcggctgttcagttttgcggtagtacctgccgcagggttctggctgagcaccgtacctgcgggctggtcgctgtattcttcactctggctgccaagccccagatggttctgcaccagcagggtgcgggcatcatccacgctcatgccggtaagcgagggcaccttggtggtggtggacacctgcggacggctgatatagaggatgaccgtagagcctgccgccacctgcgtaccggcggcagggtcggtgcggatgaccgcaccggaagccaccgaggtatccacagcctgcgtgaccagcaccgaaacgcccagtgccttgagctgctgttcggcatcggtctgcacatagttggtcaggtccggcacggtgacatactgggtgcccagactaacggtcaaagtcacgctttgtccctcgcggacggtgcggccggataccggcgactgcttatagatataaccggcggcgtagttgctgttgtactcttcttcccactccggggagatctggccggatgcgatttgatccgtggccatggcctgatccttggtcatgccgatatagtctccaagggtgacatcggccttgttgttcatcaggttggaggagtcgttcaggatcatccagcacagtgccatgcaggccagtgcaaaggcaatggtgatgccgaacaaggccggcaaaaagacagtgcggcgttttttgcccggttttcccttgccttttttgcggggtgcgggctgttcgttctgacggatcgcgcggttctggttcatggtacgtttcaccaccttttcgggcgcttcttctgtaatatactgatattcaaacagcacggaggggttctgcacataggtgtccagtgcttccagcatcgcccgtgccgaggggtagcggttctgggggagctttgccatggccttttcggtgatctccaccagcgcatagggcacttccggtgccagttcgtgcagcgagcggggctcgtccgagatttgcttgatggcaacctccaccacgtcgtcagcatcaaagggcagatgtccggaaagcatctcgtacatcatgacgcccacagagtagatgtcgctggtgcggtcggtctcgtctccttttgcctgctccgggctgatataatgcacgctgcccattgccttgccggccagcatctggttatctgcccgggaaatgcgggcgataccgaagtccatcatgcgcagctggccgttatccagcagcataatattctggggcttgatatcccggtgcacgacgccgttggcgtgggcatgctccagcgccttgaggatctgggagatgaagtgcacggtctcccggctggaaagcttgccgccccgctcgttgaggtactcccgcaacgtcatgccgtccacatattccataacaatatactgcagatggtcgttgaccgagacatcgtacaccttaacgatattggggtgattcagcagtgagatggccttggattcgtttttaaagcggcgcacaagatccgggtcgtgcatatactcccgccgcagcaccttgacggccaccacagtcccggcgggcacagggccgttctgtccccgcatgactgccttatacacgttggccatgccgccggagccgatcagctcctgcacctcatacagaccgtccagtcttttaccgatcaggttatccatggcgcacctccatcggctctactcccaccagcagggcggtaatgttatccgggccgccgttttcgttggcggtacggatcagaacgtccggcagatcgtaaaaagacccgctgcgcagcagttgctccagctgctctgtgggtacggcattggtcaggccgtccgtgcacagcagcagaacatcccctgcctgcagcgctacggtggtgaactccggctccagccggtaatccacgcccagcgcccgggtgatgatgtttttctgcgggtgatgctctgcctgctcctgcgtgatggtgccgcagtccaccagctcctgcacataggagtggtcgtgggtcagctgcgccagcttaccgtcccggtacaggtaggcgcgggaatcgcccgcgtggctcagataggccttgccgccgcgcaccagcgcgcagacagcagtggtgcccatgccggccagagactcctcccgcagtgccttctggaacacatagcggttggcactgagcagcgcctttttcaaaaaagtctcctcttcgccggggatgcactggttgtactgctcctgaaagcagcgctcgatgacgctgcacgcacactgcgaggcttcccgcccgccgcgtgcgccgcccatgccatcgcataccagcgcccatgctgcatcgccgggcagttccccggcacggtaatcatcctgattgtcctgccggacgcgccccacgtccgtttttcctgcaagtttcataggtttctccctctatttatgccttgccgttcatttcgtcgcggcgcaactggccgcaggcggcactgatctcactgccaaggcggcggcgcaccgtagcgtttacgccaagactttcaagcttttgctggaaccggcgcacattggctgcatccgtagcggagtacggactgccgtccactgggttgatgggaatcagatttacatgcgcacccatgccccggatcaggtctgccagctgctttgcgcagacatcagaatcattgacaccgcgcaccatggaatattcaaagctgacccggcggccggtggtctcctgataccggcgcacggtctggatcagctgctccaccgggtaggcatcgttgaccggcatcatactgctgcggatctggttggtgggtgcgtgcagcgagatggaaagggtgagctgcagttttttctccgccagctggtcgatcttgggcacaaggccgcaggtggaaaggctgatgttgcgcataccgatgttgacgccctcgggcgaggtgatattctccaaaaagcgcatcacttcgtcaaagttgtccagcggctcgccgatgcccatgagcacgatatgggagatgcgctcgccgatatctttctgggcagtgtagatctcggagcagatctcgcctgcttcaaggttgcgcacccgccccgcctgtgtggaggcgcagaaccggcagcccatgcggcagcccacctgtgtggatacgcacacggtattgccgtagtggtaacgcatgacaacggtctcgatgcagttgccgtcagccatgcgcagcagatacttcacagtaccgtccttggcctcctgacggcgctcgatctgcggtgcagcgatataaaaggtttcttccagctttgccagcagggtcttgggctggtcggtcatggcagaaaactcggtgaccagcttctggtgcacccagtggaagatctgctttgcccggaaacccggctgtcccagcgctttcaattcagcagtcaattctgccagcgtcagggaagaaatacagcgtttttgttccattctgttctcctataagaggatacgacccacaaaggtcgtgcttattgcgttgcggcggctttttgcagcacgcacaggaaaaagccgtccatgccggtgcgggtgggcaccgaaaggcagccatgctcccctgccgtcattccggcgggcagcggcacctccggcgcgcagaccgcaaattccgggtggcgctgcaaaaaggctgcgatctgctgctgattttctgccgggtcgatggtgcaggtggagtagaccagccgtccgcccgccttgagcagcgccgcagcggtatccagaattgccgcctgcgtggcaagcagttctgcctgccggtcagcttccagctttttatagcgcagatccggcttttttgccagaatgcccaagccgctgcaaggcacatccgtcaggatgcggtctgccatgggcagtgcagggttcggcttggtggcatcattacaaagggtatgcaccccagtaaagcccatgcgatccacagcggtgcggatgagccccacacggttctctgctgcatcgcagctgtacagctctcctgtaccctgcatctgctcggccagcagaatggtcttgccgccgggggcagcgcacaggtccagcaccgtctcgccgggggctgcgcccacgcaaagggctgccagctggctggcctgtccctccacatggtagtagccctgccggaacagttcgttgtctgccggactgccggcaaatcgtgccagcacgctgccgggcacaataccctgccgcacctctgctgcgccctgctctgtaagcagcgcgcacagctgtgcagcgctggccttgagggggtttgcacgcagactggtcaaaccgccatcggcctgataggtcaggatgcccagtgcttcatccgggtaatttttgtggaggaattccgccacatcccgcccggcagagccaagcaccatcaggcgctggatctcgtctttaaagacggcagcgtccagatcatagccgcaggccttgcgcagcacggcattgacaaggccggaggcgctggattttttaaaggtgcgggtcagcttgactgcctcgttcaccgcagcagagacaggaacctgcatatagcgtgcctgtgccagcgcggcgcgtaaaatttcccgcacaggtgcatccagctttgccagacccttgggcagaaactgctccagaatatagtccagtgtgccgcgatgctccagcacggtgtagaaaatggcacttgcaaaggccttatcccgaccttccagcttctggcgcctgagttctgcgtccagcaccagattggaaaagccatcctgctcctgccgtaccagtgcggcgactgccgccgcacgcggatttgcggccatcagagactatcccccgttttcagacgcagacccgctgcaaaggcagtgccgtccataggctttttgccctccggtacgacctccagcagctggatagccccctcgctgcaggctacggtcaggggctttgtggccagcaccgtgccaggggcttcgccatgagcgacagccacacggcaggacatcaccttgagctttttgccgccagaggtgatgaaccacgcacccggccaagggttcatgccgcgcacccagttgtggatatggaaggcagtgttggtcaggtggaactctgccatctccttgttcagcatgggggcaagggtagcgttctcgtgctgttgcggcacagccgtcagggtgcctgctgcgatctggggaatcgtttcacacagagcttcggcacccacagcggtaacgcggtcgaacagttcaccgctggtctcctcggggtcgatgacgatctttttgcagtacagcacatcaccggtatccagaccttcgtccatctgcatgatggaaacgccggtctcggcgtcaccgttcagcacagaccactgcaccggagcgctgccgcgatatttcggcagcagcgaaacgtgcaggttgatgcagccatagcggggcatttccagcacggacttcggcagaatgcagccataggccaccactacgatcagttccggggcaagggcgcggatattttcatcctcgctgccgtcccgcagggtgcggggctggaacacgggcgtgccgtgcgccagtgcaacctccttgaccggcggcgcggtgagcacctgcttgcggccgaccggcttatcccgtcgggtgtacacggcacagatatcatgcccggcagcatacagggctttcaggcactcggcagcaatatccggcgtacccatgaacaaaatgcgcatcagttgtttcctttcgcttcgcgggcggcctttttaccttcctcggtatcctcatagaagtactcgctggactccatgatggtgatgccatccagatggtcgttctcgtgctggatgcagcgacccagcaggccgtcagcttccagctcgaaccattcgccgttgcgatcctgcgcacgcaccttgacggcaacggggcgggtcacagcgccgttgtgccccgggaaggacaggcagccctcgtaggcagtctcctcttcctcagaaacggcgaggatctcggggttgacaaaatcaatgaacttgtactcgtaatcctcggggatctcctccggggcatcggtggtgtcccacaccacgaacaggcggcgcatcatgcctacctgcgggccagccagacccacgccgtcggcggcgatcatggtctcgcgcatatcgtccagcagagtagccagacggtcgtcaaaattggtcacagggcggcagaccttgttcaggatggggtcgccttctttaacaatattacggatagccataatggtacctccagttttatcagatgtcaccgtccgaatgcagatctaccacgaccgatgccttggacggcagtttttctttttcatacagtgccagtgcagcacgcacaaggtcgcggaagcggcggtcgttgcggcacttgacggtgagcttatagcggtaggtgtcgttgattttttcaatgctgccgggcgtaggccccagaatgcgcaggggcagatccggctgcttggccgcctgctgccctaaaagcgccgagaaccgggcagcggcacgcgccacctcgttctcctttgcaccggcaaagccgatgacgcacagcccgcagaagggcgggtacaagcccagcctgcggtaggcgatctcctgctcgtaaaaagcatcataatcctgcgcggcggcaagggtgagcaccgggttgtccgggtcggtggtctggatgatagcaaagccgggctcttttgcacggccgctgcgtcccaccacctgcgtgatcaggctgaacacgttctcgtatgcccggaaaccctgtgcaaacagcagcgaatcaatgcccagaacgcccacaagggtcacatcctcgaagtccagcccctttgccaccatttgggtgcccaccatgatgtcgtattcatgcgctgcaaatttggcaagcagcttctcgtgggcgtccttggcggcggtagagtcctgatccatgcgcagcacccgcgcctccgggaagagctttgccagttcctcctcggccttctgggtgccaaagcctcgatactgcagcttgccgccgcaggccgggcaaagggtgggcggcggctcttgctgggagccgcagtagtggcacagcaccttatgtgctgatttgtggtacaccatgggcacgctgcacttggggcacttgagcacctcgcggcagtcctcgcactgggcaatggtctggtagccccggcggttgagcagaagaatggtctgcttttctgcctcaagattgcggcggatggcatcctccagcgcaaggctgatctcgcggggattgcctgctgccagctctgcccgcatatccacgatctgcacgctgggcagcgggttgccgccgtagcgcttggtcaggcgcaccagctgggtgcgtccgttctgtgcagcgtagaagctctcggtgctgggggtggcgctggccagaagcagcagtgcgccgttttcggcggcacgctgccgggcgacctcgtgggcagagtagcgtggtgcggattccgaccggtaggtgtgctcctgctcctcgtcaatgatgataaggccgatattttccagcggcgaaaacaccgcgctgcgggtgccaaccacgatatctgcaccgccatcctgaatcatctgccattgcaacagacgctcggtgtggttgagcgcggagtgctgcaccgccacccggcggccgaactgtcctttgagccgcaggatcatctgcggggtcaggctgatctccggcaccagcaccagcgccttgcggccaagttccagacagcgggaaatcagctttaaaaacaccagcgtcttgccgctgccggtaacgccgtagagcagcgccgaatggggtgcggcatcttctagcttgggcagcagcgtgtcgtaagcagcttgctgctgttcggtgagggtaatggggtcgttgcgcagcgggatggaggcgtacaggtcgatggacttattcaccttgctgcattccagcacacccttagtgcacagattatccaacaccgcgcggctgatgcccttatcttccaactcgttcagggtgcgggggccgccgctcagcagcgccaccgccgccagctgctttgccgtaggctttggcttttgcggcagcgtgctcacaagcttgtaggcattttcggtgtgacgggtaagctgcttttgcagcaccggggtcacaccgtctgccgccacggcgggcttgtactgcgcaccgtacggaatgactgccttgacggcctcgtagtaggtgcagaaggtgcgctcctttaaaaaatgcaccagccgcaacaactccggtgtcagacaggccgaggccggggctacatcgaacagatatttgagcttggagtgctccggctcggcatcgcaggccagtaccacgcccatgcgggcgcggctgcccttgccaaagggcaccagcaccatactgcccagacgcaccgcattctggtgctccggcagaacggcgtaggtatacagcttatcaaaatggaaggtcgcattgctgacggcaatgcctaccgttttgggcattcgtccaactccttcaacgcttgatttttcactcctgcagcccggcacgctggcagatgacctgatacagctctgcggcgcagggctcgatttgattattgaccagctttacggtaaacttatcctgctcggccagttcctgccgggcggtggcgagacgctcctgaatgctttcctcggtctcggtgccgcggccgcgcagacggtgctccagttcctccacagagggcggcagcaggaacacggtggtagcgcccgggaacatccggcggatattggcagcgccatgcacgtcaatgaccagcacgaccaccttaccggcctccagccgcttttccacctcagacttcagggtgccgtagtagttgccgttatagaagttgtgctccaccacctgatcgttttccagcagctgctggaactgctcgcgggtgcggtagtagtagtccacaccctcctgctcgccggggcgcggggcgcgtgtggtagcagagacagtcttttcgatctcggggtgtgcctcgcgcagtgccttgaccacgctgtccttaccggtaccggctgcgccggaaactacaaacagaaatttatcattcgccatgagatgtttcttcctccattgatgctctaccctcctgcccggcggcgcggcttgccaccgtttcgggctgaagggcagacagcacgacatgatcggagtccatgatgagcacagcccgggtgctgcggccgtaagaggcatcgatcagcatcccgcgctcgcgtgcttccttcaccagacgcttgaccggtgcagagtccgggctgacgactgccaccacgcgccccgcactgaccatattgccaaagccgatgttgatgagtttcataggctcctccacaacatattattccagattctggatctgctcgcggatcttttcgatctctgctttcatatccaccacaatgcgggtgatatccagatcctgacacttggagccgatggtattggtctcacggttcaactcctgcgtcaggaaatccagcttgcggcccacgggctcgtccagctgcaggatatcgcggtactgtgcaatgtggctgcgcagacggacagtctcctcatccacggcagtcttatcgccaaaaatggcggcctcggtcagcacacgggcatcatcaatgtcacgatcctgcaggatgaccttgagtttctcgtacaggcggttggtgtagttctctacccggcctgcactcaggctctccactttgccgacgcactgttccagaaacacaagacggctttccacgtctgccttcatcttggcgccctcggcggcacgcatctccacaaagcgatccagcgcctgcgcggtgacggcagacacatcctgccacagctgctcctcgtccacatcggcgtggcgggtggtcagcacatccgggaagcgggtcagaacggcggtggacacatcatttttgacccccagctgctcggacaggtcccgcatggcctgctgatagctgcgggcaagctccatgttgacggcgaccacggtatccgctgcgtccacgttctggacggtcatgctaagctctaccttgccgcgggagatccgctggttgagctgctttttcaggcggctgtccagagaactgcaggtgcgcgggatgcgggaggaatactcgaaatagcgggagttcacgctgcgcagttccacagtgatctcacggccattgagcacggcagttcccctgccgaaaccggtcatgcttaagatcatactagctcctattcttttgcggtttaacttcggtttttctgtataggtatccgctttgggcacacaagcccatgttacgatacatatagcatcattttactattcttttctgaaaaattcaaggtgcagactgcatccgtgcaaaaaacacagttttcatttttactgctgcgcagccaaaacaacatggctgcggcagttaccgcttttccagaagttttccccttgtaaaaaatataaccccgcgttttcacgcagggtcataacatcagttcgtcttataaacgcaggtcacactggtttgcaggatatctgcattgagcagcgtgcgctccacccaatggatgttgtcggcaatggtatccagagagacctcgtattccttggcaatgctttccatcgtgcggtactcgtagcgatagatcagggtcaggatgagtttatccatcatagagatcttggtaaagcgggtcttgcgcttatgctcctgacggtaagcctcatgcagagccttgagcatccggtcaaattccagctttgaaatgccaaaatacagttgatagtcctgctcctgaaactcagcaatgcgctgctccgggatgcttcgcatagcattttcctccacatcatttgttgtattgtacggctataccaaacattataaaaggtattgggcggcaagtcaatgtgtatgcagaagtttttccgggattacccgacagagtacgtcttgtgcctttgccggatacgcaaaaaaggctactgcacagcattttgtgcagcagccttgaaagggatttatttatcagacaggatgagactggttggtgtagtccacatgatcgccgtccacgccctgctttttggcattgcgcttatcgaagaacttgggagcgacctgcgggaacattgcgtaggtcagcacgtcctcttcctgcgttgcccacttggcagcttcggccttcagcttgtccatctcgggcgccagcgtgtcggcaaagcggcaggtaatgggctgctcgtcgccaaggatcttcttggtgaactcgggcttgatgggagcgggagtcttgccgtagtcgccgtggaccagacccttgaactccttggtaaccatcttgtagcgctcgcccatgatgacgttgaacacagcctgcgtaccaacgatctggctggtgggggtgaccagcggcgggtagcctgcatcctcacggacgcgggggatctcggccagcacttcgtccagcttgtcttccttgccggcatccttcagctgcttgagcatgttggagaacatgccgcccggcacctgatacagcagggtgttggcgtccacgcccaggctcttggggctgatctggccgttggcgatgtacttctcacgcagctttgcaaagtaagcgcgcacgacattcagctgcttcagatccagaccggtgtcgtagtcggtgccctgcagggcagccaccaggctctcggtgggcatatggctggtaccaaggctcagggggctcatggcggtatcgatgatatcggcacctgcctcgatgcccttgaggatggacatggaagccagacctgcagtgtagtggctgtggatgtccacagggatgctgacggtttccttcagcttcttgaccagatcatagcaggtatagggagtgagcagaccggccatatccttgatgcagatggagtttgcgcccatctcctccaaagtcttggcgtaggctgcaaagtactcattgttgtgcacagggctcagggtgtagctgatgcagccctgcacatgagcgccttccttgttggcagacttgatggcagtctgcaggttgcgggggtcgttcagagcatcgaagatgcggatgacgtcgatgccgttggcaacagacttctgtacaaagtactccacagcgtcatctgcgtagggacggtagcccagcatattctggccgcggaacagcatctgcagcttctgatgcggcagttccttgcgcaggatgcgcagacgctcccaaggatcctcgtccaggaagcggatgcagctgtcgaacgtagcaccgccccagcactccacggagaagtagttgatcttgtccatttcgggcaggatggggcgcatctcgtccatggtcatacgggtagccagcaaagactggtgcgcatcacgcaggacgacctcggtcaccttgatcggcttttttgccatggttgtcacctcttccttagttcatggaaaccagaacgtcaccggagttgacggtatcgcccttgttcacgttgatggaagccacagtgccatcctgcggagcaacgatctcgttctccatcttcatggcctcgaggatgaccagcacgtcgccggccttgacagaagcaccggcagcgaccttgacatccagaatgttgccgggcatgggagccttgacggcaacagcaccggctgcaccggcggctgccttaggagcagctgcaggagcgggagcggccttgggtgcgacgggtgctgcgggagcagcggcaacaggagcagcgcctgcggcagtttcctcaacggaaacgctgtaagcaacaccattgacagtaatattgtagtacttcatggaaggatcctccaattcaaaatcgaactcaattaacttacattcggacgcttacagggccatattgccatgcttcttgggcaggcgggcagcgcgcttggtgctcagcagctccagtgcagccacaacgctagcacgcacattagcggcatcacagctcatatcggcagcaccggcggccactgcgctggcagcgctgcacacctcagcggtgtaggcagcagtcttagccttggtggcggcaatgatgttgtcggaagcatcgatctcatccttatacaacacgctgacagcggcgctgggctccagtgcgctgacggtgcagccggtcacagcaatgcgcaggtcggcagcagccagagtggtgtacacagggcccacagccttgcctgccagcactgccacctttgcggtggtagcatcggcgtaggtagcggccagacgggcagcctcgcggatgccgccagccacgtcatcggtaacgctgggcacaaagccctcggtatccacgatggtgaccacaggcacgctgaaggcatcgcacaggcgcacaaagcgggaagccttggctacgcagttgtggcacagctgcttgccggttgccacaacgcccacggcgttgccgccgatggttgcaaatgcggtgtaaacagacttaccaaagcctgcgtacagctccacagcgctgtccttatcgatcacagcggcagcagcctttgcgggctcggcaccgacggccagaacagcggtgggctgctcgaactcgaagattgccgggccggtcaggttgttggcgggcagcagacccacgatgtgagcagccttttcagcagcctctgcggcgtcggcggccacgatggaagctacgcctgcctttgcggcagcggcagcgctgcctgcatcggcgaccttgtcgcccttggcagcggaggtaaacggagcggtgaagaacagctctgcgccctcagccatgatgcagacgtctgcgttggcagcgctcagagcactggtgccaccgcagacacccagaacaacggccacctgcggaacaacaccggagacctttgcgatctgtgcattcagctttgcgctggcggtcagcacgtccagaccctcggccagctttgcgcctaccgagttatagaaggtgaccaccgggcagccggtctgtgcagccatttccagaaccttgatgttcttttcaacatcctttacggtgacagcctcgccgttctgataaacagcgtaagcctgctgacctgcagcatagccgcaggcagcgctcactgcaccatcagcaaacagtgcagtgtactccccgtcatcgaagaacttggcgaggatttctcccttattgatctttgaagccataattagacctcctggttgtctgtgtgagctttcaaaattatatttattatacagaagctggcaaaaaaatgcaagggattctataaaaatccatgcgattcaacatccatcgcttatggaaagccaaatttttaacgattcatcgttttgcgcgttttatccgggtaaatcatcattttgtggatgtagaaattttcccggtttttttggcgaaactgcacccgcctgctgcgttttctttcctgcctgtttatgttacactatggttacaaaacatagattgccggacgatctgccaaactgtacttatacagcgcacacgaagcgcccggtaaaaatgaaaaagaggttgaagctatcttgaagcgattctccgccaagttccggcagcaggagcagatctaccgctccctgcacgatgccgcccgatccctgctttcgccaaaaggacgggtatttctgctttttctgttgttttataaggcactgacaaatttcctgttcgtaccggtattgcagctgatttgggcgctgacgctgcggttcgcgcccattcgctacctcaacaacaaaactgcatcccgcatctttgcctcccctgccatcatcgtgtgcattgctgtgttggcggtactggcagccttttggagcctgtatgaaatcgccgcgatgctgcaactattgacgcggatgcggcacggcgaaccgctgcgggcgggggcggtgttccgagatgcctttcgcagccttgtgcgagtgtttctgccgcagaacctcccgctgctgctgtatggcgctgccctgatcccgctgacgaacttttttcttgccgcgaatcatctgacccagtttgccgtgccggaatatctctgggggctgctgaaggcgcgcgctgccaaccgcttgctgtttgcattggcggtgctttttgtgctggcactgctgttggacgggcttgtggtgctgccaaaatttctgctggagcgcaaaagctttggctgtgcatttgcagagagcctgcgggttttgcgcggccgcgccgggcagctgcttgcgctgtcactacgctggatgctgaccgctgccgtgcgcaccgggctgatgcttctgtgcggggctttactgttctattgtgtcatccttggtgtcggctttgccagcactgctgccctgctggcgctttcccgcgctgcactgctgatcgagttgccgttcctttgtatgctcatggactgtgccatgacggcggcgcagagcacccttacagaggcactgtatgaagtgacccggcagtccgatgcagcgcagccgatcatttgcagtgcatcccctgctccgcaccgcgaacagacggtgctggcaggaatgatggcctgcgccgcgctggtcacctgcggcgtagcggcggtatatctgcttttcccgcaaacacagccgctgcaaagcgtgctgggtctttccgatccggtgatcacctaccaccggggctattcttcccgtgctccagaaaataccatggtcgcctttgagaccgcgctggagcacggcagcccccgcattgagctggacgtgcagatgaccgctgacggcgtagctgtggtgacccacgacaccagtttgcgccggtgcaccggctgcaacgccaacatctacgacctgccctatgcgcaggtgcagcagctggatgccgggcgctggttccatcggcagtttacgggctcctatattcctacgctggaagaggttctggcgctgtgcaagggcaagactgagctgaacatcgagatcaagcccagcacctttacgccgacattggaggccgaaacggtgcggctgatccacgcatacgactacggcgcggactgcgtggtcacctctcaaagctacgagaccctgtgcaaggtaaaggagctggacccggacattaccacagggtatattctggcgctgggcgttggcacctactacgacctgcctgccgcagactttttcagtgtggaatccacctttatcaccgccggtatggtgcagcagatccatctgcggggtaagaccatctctgcatggaccatcaaccgccagcaggatgcggaaaagctgctgcagctgggtgtggatgacctgatcactgacaagcccgagatcattgcgccgctgctggcacgggacaaggcactggacaaccgtctgctctggctgcgggatcagattcaggagttgcttgccgccccggacgctgaagaagcgatggaggtggaggaaaccatcgaggatgctattgaggatcccgaagaggttttggacgaagcgtaagaagatttatacagtaataccgggcaggctgcgggctgcccggtatttgcattttcataaacataaaaaaggagccgcagacccctgttacaggtactgcggctccccttttgtctttggaagtttaaattacttcaccatgcttgcaacttcagatgcgaagtcgtcagcacgcttctccagaccctcgcccttgacaaagcgggcgaacttgacaatcttgatctcgccgcccaggtccttagcgaccttagcggtgtactgagcaacggtcaggtcgccatccttgacgaactcctgatcgaccaggcagttctccttgaagaacttcttgatcttgccctcgatcatcttctccttcacagcctcaggcttgttagcggtcttgggatcctgagccatctgagccagcatgatctccttctccttagccacgacctcggcggggacagaagcctcgtcaacgtagccggggttagcagcagcgacctgcatagcgatgtccttgccgtaagcaacgaactcgtcctttgcatcgatgtcgttggtggtctcgaagttgaccagaatgccgtgggtgccgccgccgtggacgtatgcagagcagacgccctcgtaacgggtgaagcggcgaaccttgatgttctccttgatgaccaggatcaggttcttcagagcctcgtcaacagtctcgccagcctcggtcttgcaagccatcagagcctcgacatcagcggggttctgcttcatgatgaccttggtggcctccttgacgaagtcaacgaacttgtcgttcttggcaacgaagtcggtctcagcgttgacctcgatgacaacaccgaccttgcaggcggggcagtagtcagcgtagaccataccctcggcagcaacgcggcttgccttcttggcggcggtagccagaccacgctcgcgcaggatctcgattgccttctcgaagttgccgtcagcctcggtcagagccttcttgcactccatcatgccgcagtcggtctgcttgcgcagttccataacgtcctttgcagaaatagccatttttgttttctcccttacacgttatttgattggttgcggaatgggaaatcaggcgtttgctgcgtcctcggcgggagcggcctcctggttgccctgcttgccttccagcacagcgtcagccatagcgccggcgatcagcttgacagcgcggatagcgtcgtcgttgccggggatcacgtagtcgatctcatcggggttgcagttggtatcaacaatagcaacgatggggatgttcagcttgcgggcctcagcaacagcgatgcgctccttgtgaggatcgacgataaacatagccttcggcagggtcttcatgttcttgacgccgcccaggtacttgtccagcttctccatctccagctccagcttagctacttccttcttgggcagcagctcgaaggtgccgttctccttcatcttagccagctgatccatacggtcgatacgcttacggatggtgcggaagttggtcatcatgccgcccagccaacgagcgttgacgtagtgcatgccgcagcgcagagcctcgtcacggatggactcctgagcctgcttcttggtgccaacgaacaggatgtcgccgccctcagctgcaacttccttcacatagttgtaagcctcgtccagcttcttcacggtcttctgcaggtcaatgatatagataccattgcgctcggtgaagatgtacttagccatcttggggttccagcggcgggtctggtgaccgaagtgcacacctgcctcgagaagctgcttcatagaaacgactgccataataaaatacctccagatattgttttgcctccgcacaccgtgatctgcacggtacatcgggtaccggcggactgccctcaacccaaaagggcacaaaagggcatagtgatgcgtgtgtaatgctttgttataatagcacaaaaagaatgcggttgcaagtggttttctctgttttgtataaagaaatgcttactttttctcttatttgcccgtattcatcccgctcaaacctgcaacacccatacggttgagggcgtatcccttgccgaacatcaggtcgtattgcagcatccagtgctcgtttgtccagcgctgctggaactccgtgggctgctgggtggtggtgccatccagattcatggtggtgccgcgggtgcagctgcggctggcgacccgcagctgccggttgaggaactggaagtacagcggctgctccagcccgaacagttccatcatcaccggggagatatcgtaggcggcaatggtgccaaagtccacctgctgctggctgtaattcgaccacatcagcagcgtggtctggtgcagacgggggtcggtgctggagccgcttgcgtagccggtggtggtgtagacatcgtagttggaatcaatggggttatagtggtcgccccagaataccagaatgaccggctcgtccacctgagagaaatacgctgtcagcttgcccagcatggcgtctgcatcccggatgccggtagcaaaatcttccagcgcgcccacggtgctgctcttgagccccaccggatgagatacaacgtgtacccgctcgtcgtccgggtagttatccctattataattggtatggttctgcatggtgaccgcgtgcaggaagatgggcttatcagaggaagtgctcatcttttcgtactgctgaatgatctggtcggccatggagtcatcggtcacaaggccgctggtccagtagtgcttgcgcaccttggtcacaccgtgcatatcctccagactgataaaatcgctgaagccgaggttggggtaggccttatcgcggctccagtattttgcccagaagcagtgcaccgcagcggtctggtagcccttgagcttgaggtaattgggcagggcgaacatgggctttgtgacgtgctgctggtagggtttgctgccgctgggcaggaaggacacggagtagccggtcagagcttcaaactccacatcacaggtgccgccgccaaagctggggctgtacgccctgccgtaagcgctggtctgctgcagagcgtgaaggttctgcgatacatcggtatcaaaggtaatgccgcactgctccagctccgaaacatcccagtaggattcatccattacataaataatggtaggctgctttgcctgctcctccttggggggtagtggcggcatagctgcctgcatacatggggccggtggagaatttctcactctcggccacgttatccagaatatcgtccactgcctgctccgagtagccctcgggcttggcgatctccaaattggtgaggttggtcataaaaccggtaagcacaccgtagtaacggtagtagcggtcctgcatccacgcatccggcgtgatgcccaaaacctgcgtgactgcaggctgtaaataaacgccgaagatcagcagacacagcgccgctgccgaggcaccggtgcccgcaagccttggcagccagcgctggcgcagccgcccgcggtaaacaaagaagcttgccaccgtcagtgccagcaccagcacaatggagaccaccatgctggtctgcagcttgagcccggcagcagaggccacaccggcggcttcggacacctgcatcaggtcccacggcagaaagggctcaccccgcagctgcatggtatagaagtttactgcgcagggcgcacagcccaaaacggccatgcccagcgtagcaagcggcgggatgcgcagcacccagtccagcagctcccacaccagaaacagcagcagccatgccagcagatacgccccgaaatgggggaaaataaagctgataaaggtatcagcggtcagtgacccgcgcgcgatccactcacccagcagcagcacaataaaggaagctgccgccgggaagagcatccgcagggtcaacagcggtttggatgttttcatagtcgatatccctttccacgtcccgaaccctatttccaaagtggctttgctatttgcacaagcctttcgtgcctattatagtcatttcgccgaaaatgtccattcatgattttacaaaaattacagttttatttttcaaaatattcccctatttttcacagaccaagctttgcccgcagctgctgccagaagccgtgaggtgctgccggtgcttttggcacagcagtatgcaccagaattgcgtctgtgccgatggtctcgatctcctgccacgggatggtcaggctctcgtcccggcccagcaggccaaaaagccgcggtctgcccagcaaaatcaagctttgcagctgcgccgttgcggggtcaagctccagatcgtccgcgcggccaaggcacatcccctgctccagctgaacgacctccttctcacaaagttcccggatcgtcatggcgctctcccctttctgtcacagcatacgccggggcggcattttctatgccaaaggggtggaaagcacccgcccggttgtggtatactatggaaaatatctggaaaacatccaatacaagcgaggcagtatttatgtataaaagcattatttttgatatcggcggtgtactggtggattttgaccccaaggcataccttgtagaccggctgtgcaacgccgaaatggaagagaaagtttacgacctgacctttggcagcgaggagtggcagttgctggacgcaggcaaactttcccgctatgacggcaaccagcgaatgctggagcacgcccgtgccgagggctgtgcctttgaggtgcagggcgttctggacgactggatgcacattctgcgcccgcgtctgcggatgctggagctggtgcggcggctgaagaaccacggctattgcgtgtattacctgagcaacatcccgcaggatgtgctggagctgctgaccgagcgcggcgtactggctcagtttgacggcggtgtagcctcctgcgaggtacaggtgaataagcctgacccgcagatctacaaggctttgttgaaaaagtatcagctgaaggccagcgaatgcatatttatcgacgacagactggaaaacgtgcaggccgcctttgcgctgggctttgccggcatccagatgaaggacagcgttggtacgctgatccgcagccttgccacctgtaacgtggcgctgcgctgaatgttcatataacaaacagcagcccctgccggaaaggtttctccggcaggggctgctgtgcgttggtggggaacttacttttcctcgtagctctggcagtagtgcggggtctccacctgctgggtggtgcagctgcactgctccgtcaccttgatctgcggcagatcacatttgcagccgtccacgttgtggcagcacgcgcagacatcacaggtcacgccgatgttttccatgtttatcacctctttgtccataggttgccctatggagcaagagtttatacatgggttttaccaagcagccagatctgcgcccagcttacggcaggcggcctgcacatcatcatcgggcgtttcgttgcagatgaggccttcctcgctgaacagctgtgcgccgtcgtcctgtgcgcgctgcgcccaatcgcgcatccactgaccgtcaccccagccgtaggagccgaacagtgcgatctttttgccgttcagagagccttccagcgcagcaaacataggctcgaactcgctctcctccagctgctctgcacccatagccgggcagccaaaggccacaacgtcaaactctgccaactttgcgggggtcatctcggcgcagggtacgatggtgccgttggcgcctgcgccctcggcgatgcagtttgccatggtctcggtgttgccggtggcgctccagaatacgattgctactttgctcataaaactctacctctttctctgcgtagttagtttagaataacttcatgttctgtaaaaatgcgtccgtgtttcatgacgcattttgcggttagtatcttctaaccgtcaacaggataccacagccctgccctgcttgtcaagacgttcgtgcaatgtttgcacggtgcaacaatcccgcctttctcaaaagtgcatgaagcgtgtatttcagccgcctaatacgcggaaaactaccaacagcaccccgtagatgaccggctggtgcagcagatacaacagcagcgagtgccgcccaagccagccaagcggcgggcagaccgagcggcgcaagggctccatgcgctgccgccctacaacgtcgtagagaaagtaccccgcccagaacagaaacagccacggcagaagggcaaaataatccgtagaatagaaccaccacggataaaagccaaagtacgctgtaacgcagtttgcatacagtgtctgcggcagccaaaggcgcaggcttccaaaacccagatagcctgccgagacattgcgggtaagagcaaacaacactgcggagatagcaaaccctgctgcgggtggaatgtgccgcagtggcttttccaaaaggccggtcagcagcatagcgctgcccagcagggtcagcacaccaaagataactctgtcctccggcataaaaagcagcgtgactgccgtgacaagcgcccctgccccaaacacctgtgcgccccggcgcaaggtatgatgccccagttgcacacagaagccggacaacagaataaacacccaacagatgctctgctgccacagatgcccgggcagaccataataccagtcggcctgaatgccgaagagattgaccagatcccagcagccgtgatagagcatcatgctgaccagatccagcccgcgcagttcgtccagaagggcgtagcggccagaagtgtcactatacttcacgtcggattccttcttttttgtcacgctgttacaccgttttccggcgcagcaggctcatgggcggcagctccggggtgggcatggtgtatttttccatggcgtgaggggtgctttccacccgctcctctgcttcgttctcgatccattccggggtaagcgggatgctgcgtccgtccgggcacagcgcctccagcgtatccccaaggctccatttgccgcgctgctggcagtgggcgatgccgttttcccagctgtccaccgtgcccacgaactcccactcacggatataggtagcgctgtcggtggcctgcttggcctgctcgcggccaaaatagaagccgggagaatagtgacggtggctggtgcgggtaagctctgcgtacacctccggcggcagttcaaagttatcgtttgccgggtcggccagataggcgtccagtgccttgcggtaggcagcggtaacgctggccacatagtagaaggtcttggcacggccttcgatcttcaggctgtccacgcccgccttgcagatcaggtcaatgaagggcgcggtgcacagatcgttggcgttaaggatgtagctgccgttctcgttttcgccgatctcgtacagctggccggggcgggtctcctcgctcaggtaatacttccagcggcagggctgggcgcactggccgcggttggcgtcgcgcccggccatatagttggacaacagacaccggccggacacgctcatgcacatagcaccgtgcacaaaggcttcgatctccagctccggcggggtcttatcgcgcaggatggcaatatcctgcaaggtcatctcccgggccagcaccacccgctttgcgcccattttgtaggcggcgcgggcggctgcccagttggtgatgccggtctgagtagaaagatgcacgtcaatgtccggggcaaaggtcttgcaggcgtccagcacaccgagatctgccacaataaaggcatccacaccggccttggcagcctccttgatggcctccggcagacggtcggcctcctcgttggtgggcaaggtgttcatggtcaggtagaccttgcgaccacgggcgtgggcgtagatgacgctttccgtcagctgctccggggtgaaattagccggggcagagcgcataccaaactccggcaggccgcagtaaacggcatcggcaccgtagttgatggcataacgcagacgttccgcatcgcccgccggggcaagcagttccgggatctgtaacattgtaggttcctctcttatgtatcacagttttctgaccggaaaggggccgccgcaccatgtttttgtgcagcggcctttcctcagtttttcaggtttttgttcacagctgcggcagttttgcagttggcattgtgctctgccagcgtgtgggcatagtagtaattgcccttgaggtcggtcacaaagaagtaagcgttcttggcttcctcatcgggctgcggctccagcgctgccttgatggcggcaaggccggggttcgagatggggcctgcgggcaaaccggtgcagctgtaagtgtcgtatgctgcaaggatattttccgggatattgtcccagccgccgtagtagggtgcgacccagttccagagatagttgttgtcggcgtcgctctggacatggctggaggtgttgctttgcagccgggggtagggcgagccctctgccagacgattgcggaacacctgcgccacgttggagtcctgactgttgcccgcttcctcctgcacaaaggaggcaagggtgaccagctccggcagggtcatgtcctgctttttgagcgctgcgtacatttccttggtaaattgtgcatcgaactgggcgtagaaggtagctacatagttatgcaccgtatcatccttcaaaaactcgtaggtctccgggaaaagatagccctcacacttcataaagcggttcggggcctccttatcctccgggacatactgccagaaggtataagcgctgaaatcgccctcgttggcttccttcagaaactcctcggcggtgcacagaccggcggattccatcttttgggcgatggcaatggccgtggtgccctccgggatggtcacccgcaccgtttctgccttggcgtactgggaaagggtggcaatgatcgcgtcgtaggaaatcgcactggtctgcaagacaaaatcgccgtactgcagctttgcggcagcgcccttttgtcccacataccagcgaaacaggtaggcagagcggatgactcccgcctccttcagcttgttggcgatcgccgctacgccgctgccctgcgggatgcttacagtcacctctgtgctgccgggtgcaccattgccgtggatctcattgtaggcaaagtgcaccgctgcacctactgccagaagaagcagcagaagcactaccagcagaattttgcctgcgccgccctttttgcgggctgcgtgtgtatcgttgtgtgccatacgcaccttccttttttcagttttccagcatcagacgcagatagctttcgctcacgtcaaaaggctctgcgtcaaagcggatcatgccgtattcctgccgggtgccctcgcccagaaacagcggctgggcagcgcctaccgtgatgaccgccttttccacgatgacttccttctcgcgggcggcttccatcaggatctcggcggcgcggtcgctgtcggccatcatctccacaaaatacagagtatcctccttgcggaagtagatgccgtagccatgttcgttggacacgatggtagcgccccgggcgtacagctcctgcaacaccaccgccatgcgttccgggctcagctgcacggtatccttccagaactgctcccgcagctcgcacagcttttttgccgtcaccgtgtcaaattccgcctgactccacaggttgcggctcacctcacggggcaggcaacgcagggcaaaagcctttgcaaagcccttatcctgcagcaaagcggcctgtgccgcatctgccgggactgtcacggtaaagcctgcgccccgcagcttttgctgggcgcacagggtatccagcagacccgccagcagcagactgccctcgccgcacaggcacaaataattgcccgtgcgcccctgcagggtgaccggcacagccagcgcagccgccacgatggcgtcgttttcgtcggccacataaatgttctgcacaccggcaaagcgttccagtaccatttttgcaaaatcttcggtatcatgatgctggctctgccacaaagccagcactgccgcctcgtcagacggctgcatcagacgatacatcgttcaggatgccccctcttatcatattttatcgttcagcccagtgttttccgggcaagctgttgcacctcttgctggatctcttcaatgctgcgcatggcgtccccgctggtgcagtgcacggtatcccagccaagatgccgggcacagaactcggcagcagcgcggctgcgcgccagataggcggtatccttctcgtgcacgtcctttttgctttcgtcgccgtggtagcgctgggtcatcagccgctggctgaccgccgggtctacctgtaaatagatgaccctgtccggtgcgggaagtcccagcagacggaactcgtaatcaaacagccagtgcagatattcctcccactgctcctgcggaagcttcgagcactggtgcaccgcgttggaggtggtgtagcggtcggcgatgatcacaccgccctgctcataaaagctgccccagctggttttatagctggcatagcggtccaccgcgtaaaagctggaagccgcataggcgtttacatcgtccgggtgctggccgaactgcccggccagatacatcttgaccagtgcgctggaatcactggcatagtccgggaaggtgatcttttgtaccggcacaccctgcgcggcgagatgctctgccagcagctttgcctgtgtggccttgccgcttccgtccagcccttccagcacaatcagtttgcccttgctcatacggcggcaccttctttaatggcggcatattttgcgcgcacctcggcggtcttgccgcagcacatcttgccctccgggcaggggccgcacaggcaggcggggccggccttggcaaagatatggggtgccaccgggtacaccagcgcgaacatcttttcggccagttcccggatctcccactgggcgcggttgcagcagcgcagctggaagaagttcatcaggctgcgggcgttcatggtgaccaccattttggtctcgcaggcgttgggcaacacaaagcgggcgtcctcgttggcctgtttagaagccttagcgcgggcctgcttttccggcattccctcagccatcaggcgggcggtgtgcccctcctccagcttgtgggcaaggtcgagataacgctgggcgtcctcctccatgctggcaaggaaagctgcctttgcttccgggatagcctcgatctccgggggcgtcacatagcggaaatcatccagacgcacatagcgctggctctgcacgctgaaggatgcgatgcggtgccgggtgatctgggcaagcaaggtgcggctgaccccctcgatgccaaaagtaaagctggcgtgctcgatggggctggcatggccaaggtcgctgagcatggtcaggaattttgcagttttttcctcgtccagcccgtccagaaggtcggtgatgtgggcgtcggaatagcagagctttgcggcagccgccaccaccttttccggttccggggtgtgggcgatcaaacgaacagtcatcatagggtcattcttcctccgtaatcttggtcaggggcgcaaaattggccatcgttttcttgatgccaactttttcaaagttgatctctacgatctgatccccggcagcgggctttaccttcagcaccgtgccgcggccgaacactttgtgctccacgatgtcgcccggctcatagtgctttgaaccggaagccgccggtttcacggcagaatttaccgtaaaggctgtttgctttacagtattttttgtcgcatttccgccggaatatgcggagccaaatccgctgcttcttgtggtcggctgggtggagctgttgccatagtgactgccaaaaccggaggaagcagggtttcttcctccgtaagaagagccgaaaccacggctttcgccggcgttatattcccggttcaggtagccgctgcggttgcccgaactgtaactcgagccataaccgccgccgtagctgctgcggctgtaaccggaggggccggagtaaccggatgctccaccgggcacggtatcactgtactcagagccccagccgcccatgtgggaacgctgttccagtacagggctgcgggtctcctcgatatactccggttcgatctcccgcagaaagcggctgggctcgttgcgctgggtgcggccgtacagcatccgggtgacgctgttggagatatacagttcctttttggcgcgggtgatgccaacgtaagccagacggcgctcctcttccagatctgcctcggagtacttgctcatctcgctggggaaaacgccctcctccatgccgatgaggaacacatagggaaactccaagcccttggcagagtggatggtcatcagcaccacctgatcgttactctcgttatagctgtcgatatcgctgatgagggcgatatcctccagatagccctccagcgtggcttcctcgccgtgctggtcacagtagtttttgacgttgttcaccagctgacccaagttctgcagacggtcggcggcatcctcgtgccccttggcggcgtctgcttccagcatggccttgtagccggtcagttcaatgacgtcggaggcaaactcgtccagtgtgcgggttgcaagagaatcctgcaaacgctggtagatctgccaaaacttgagcagcggcatgaccgcgcgggaaagtttcgcgtattggtctgcatggctgatgatatccagcatactgaccccctgctgcccggcaaggtctgcaatgacatccacggtggtagcaccgatcttgcgggcgggctcgttgatgatgcggcgcagccgcacatcgtcccgggggttggctacaatagacatataggagtgaatgtccttgacctccttgcggtcgttgaagcgctgcccgcccacgatcttatgcgggatgcccgcgcgggtgaagtagctttcgatgggagccgactgggcgttcatacggtagagaatggcgtggtctgccagatgcccgccctccttcaggtgctgaccgatgacatccgcgatatggctggcttcgtcctgctcattctcggcggtatacacctgcaccttatcgccctcaccgttgtccgtccacagggtcttgcccttgcgctcggtgttgtgctggatgacgcagttggctgcgttgaggatattggaggtggagcggtagttctgctccagacggatggtcttggtgccgggatagagcttttcaaagttgaggatattttcaatggtagcgccgcggaagcggtagatgctctggtcgtcgtcgcccaccacgcaaatgttgcgctccggcccggtgagcaggctgaccagacggaactgcgccacgctggtatcctgatactcgtccaccagcaggtagcggtacttgttctggtagaactcccgcacgtccgggtgttcagccagcagctgcacggtctggtagatcaagtcgtcaaaatcgaacgcaccggtctctttcagctttttctcgtaagctgcgtagatgcgggcggtctgggtgctcttcacgtctctggcgtggtctgcaagtgcctgctccgggctgaccagctgatccttccagcggctcatctggttgatggcggccttgatgggcaggaatttatcatcgatgctcagctctttatatacggttttcattacacgctgggcatcgtctgtatcatagatggtaaagctgcgggggtagccgatctcttcggcccagcggcgcagaatgcgcacacaggccgagtggaaggtggaggcgaacacctcgtccccttcctcgccgcccagcatccggcgcagacgctctttcagctcccctgctgccttgttggtaaaggtaatggccatcacgttccagctgcgcaccgcgttgcggcgcagcatcccgtccagccagctgggggcgtctgtaccggtcataatggcggtgcgcagggctttgacgtcctcctcggtcaccgggcggggcgtttccttggagccgtgcgccgagccgaaccggataaggttggcgatgcggttgaccagcacggtggtcttgccgctgccggcaccggcaaggatgagcagcgggccatccgtggtaaacacagcctgccgctgcatatcgttcaggcggccgaattgcttttcaatgtaagtatcacgcagggtgcagaattcctgcccgagagatgctgccatggtttcacctgtttccttcgctgttattcataccgtatagtataacacatttcaaaatagttgtacaccaaaactgcatagagttacagctgcttttccagcagatagcggtcgtagccgccgtacatctcccggcggcagcggatgacaaagccggaagcctgtgcgttgtgcaggctgtaactgttgtccgggctgacggtagcccccagatgggtgatctgtggcggcagcagcggcagagccgcttccagcatggcgcgctgcaaaccgttgccccgccagtccgggtgcactactgcgctgtctgcgttggcccagtgctgccactgactttgcggcacgcccagaaaggcggcatagttttcatcgctctgcccgcacaggcgcaggatgaggtacgcccccagccgcccctgctgccacgcgccaatgcacaccccggtgcgcagatagccggtaatattttccagtgtgtccggcacgaactgttccgggtgcggcatggcggcgcgcacttcgttttgcagcgcgaacactgccggtgcctcggcaggggtgcagcgccgcagggtgacagcctgccgggcggacttgccgcctactttttgcagaaaatagtccatctgtactatgccctccaaaataaaatcgtacttttcagcagattccagtataaatgacgcttttctaaatgtcaaattatgctataataagagagaaggggctgtggaggaatcctctcggcccgttcgtatgaagttcggggcggcgctgccgcccggaaacggaggaaccatccatgaaagatcccgcactggcatcgtccagccgcttgggcggcgctgtgatcagcgaccgcgttgttgcaagcctgctggaggagctgaccaacgggcgctatgcccaagccgaccgcctgcccgccgaggtagaccttgccaccgagttgggggtaagccgcaccgtgatccgtgacgcgctgagcgagatggagcgcgccggttatgtggaacgggtgcgcggcattggcacggtagtgaaccgtgctgtgctggggctgcgcagccgtttggaccagaagctggagtactacccgctgatccgcagctttggcagctacccccatgcagatggcattcaggtgatgcttcttcgtgcaggcgaggagatggcccacgcgctggcgctggaagtcggcgatgaggtgatctgcatcaaaaagcgtatccttgccgataccaccccggtgatctactccatcgactacctgccccgcagcctgttcggcaaccgggactacacccgcatcgacctgaccggcgacatctttgagatcctggagcaggagtgccaccagcagatctcctccaacgtggcgcacctgaaggccagctgcggcgacgaggccatccgcgcagccatgcgtcttgccccgggcgaggccatgctgctgctggacgaggtatgtttcaatcgtttgtgcaggccggtgatgcgctcgctgagctactacacaaacttttttgatttttccattttacgcaaactgctttaaacggaggtatcttatctatgcgtcacctgatcgatcctttggatctcacccagcaggaaatcacacagctgcttgatcttgccgaccgtatctgcgccgaccctgctgcctatcaggaggtagccaaccataaaaagctggccaccttgttctacgagccctccacccgcacccgcctgtcctttgaggcggctatgctgaacttgggcggccatgtactgggcttccccagcgagaacgtgtccagcgccaccaagggcgagagcgtggccgacaccatccgggtggtttcctgctatgccgatatcgttgccatgcgccaccccaaagagggtgcaccgctgcgtgcctcccgctactcccgcattccggtgatcaacgccggtgacggcggccaccagcaccccacccagaccctgaccgacctgatgaccatccgccgccgcatgggcaggctggataacctgaccattggtctgtgcggtgatctgaagtttggccgcacagtccactccctgctcaagaccatggcgcgctgcaagaatgtgcgctttgtgctgatcagcccggaggagctgcgggtgccggattatatcatcaacgatgtgctggaggccaacggcatcccctacaaggagacccgcagtctggaagaatccatgccggaactggacatcctgtacatgacccgcgtgcagaaggagcgcttcttcaacgaggaggactacatccgcctgaagaacagctatgtgctgacccgcgaaaagatggcacaggccaagcccaccatggcagtgctgcaccccctgccccgcgtgaacgagatcgcactggatgtggacgatgacccccgcgccgcttattttgagcaggtgcagaacggcgtttacgtccgcatggcactgattatgactctgctggggcttgcagaccccaaagcaccgaaggaggaaaactgatatgttgaatattgacgagattcagaacggtattgtcatcgaccacatcaaggcaggtactgccattggtctgatggatctgctgggcattgcgggcaaccgcactgccagcgtggcgctgatccagaacgcccgcagcaaaaagacggcaagcggccgcaaggacatcatcaaggtagagggcgatgcctcctggctgaacctggatgtgctggcttatctggacccgaacatcagcgtgaccattattgaaaacggcaaggctgtccgcaaggaacagcccaagccacccaagcgtctggtgaacattgtgcggtgcaagaacccccgctgcatctccagcattgaagaagaatgcgaccagatctttgagctgagttccaacggcaagtaccgctgcatctactgcgagcaggagctgcaggtaaagccggagtaactgcgctttttacgattttaaatgcgctccgcttcgctctgcgcatagtttaaggaattgcattttagtattgcagctcagccaagcctgcgggcttggctgagctgctttttcacgggagggacgcagagagaaactgcagctaccgcgctggttttctaccgaaacagtcgcgcggcgggttggctttctgctgactggcagatacgatgatttaatagataaaaaggactgctatactgggcaaaacccatgtacagcagtcctttttggtgcaaaagaaaactaacgggactctttgcagcgcacgacaccccggcttgcctatgtcattcccgtacagcaggcagcgccggaattgcgacgcatcgagaaactttatcgactgcaacccccaaaaggcccgccgcagaaagtcccgtcagcaaggtactgtgcattcctgcacagcccaaaaaagcaaaggtaggcagcctgcttacacgcaccgcaggctgtttttccatccagcaacaaagctcttaaaaagagggggtgtaaccctcccaccgcaacgtgaccatgtccgcacggaaggcttcctttactgaccacagtatagcagagttacgcttctgttgcacaaaaattgtcatattctgacggtgcagatgtcatgaattgccggtgggcaccgcacaggtaaagcggaaccaattgtcccggcagctcagggtatactccgcgccgtggcgcagcaaaacatcccgcacgttggaaagccccatgccgtggccgggctccttgcgggtggtgcggggcaactgcccatccggcggcagctccacgtcccgctgcacccgattgcgcaccgagagaaggtattcctcctccgttttgcgcactcgcacgtagacctccggcgggtacgcctgcgctgcggcacagatggcgttatccagcagattggccagtacggtgaccatgtccactccgcttagcgggaaatcccgcaggtcgcaaagatcaaaatacacgcttacgccctgccgggtggcctcctcgtatttgcgggtcaggatggagtccaacagcgggttgtgggtatccataatggtagtgctggccgccacagccttatccacaccggcaatatagtcctgcgcaccgcccacatctccctgctccagcaaggcacgcagcgcactgatatggttggtgaactcatgggtcaggcggcgctgggcggtgtaggaatccagcagagccgaggcccgctgctgctccagttcggcctgaaaatgcaggctgcggcgctgcatgacctgatcattgaacatagccacgatacacagatgcaccatgacggccaccgtaagccccactgtcatccccattgtggccatggtggcccttttgttgttatctgtgagcataagcaggatgttcagcaccacgaccacgcccggaaaaaagctcatggtcagcgcctgcaaaggctccagtgcattgcgcctgcgccacttgcttaccaaaaaggccacagctgcgcccaccaccaaatttgccaccgctatgatgatcagacagtctgcgcgttggataacctgctgcagttcacacttcagtatccacgatatgacataccgcatactgttttcgaccaacaggcacatggtaccgttgatcaggcaggcggtaaacttttgccccggcgtgccgccaaacagcatgacggtgatgaacagaaaaaggatcgtgagagccactgccctcggcgtaaaaaagccaaagttgtacacgaccgagagggtcatcgtgagcatggttataacacaggaccacaccagcggatgctttatctttcccttgccaagataagcatattccaccatgataaagccgagccactgggcaaggcagatccagtggccgtacatataccagcgccagaattcttcattcatcgccgaactgccccttccattccagccatgcgctgcggatggctgtatagtactgtcggctgacgctcagttctaccccgctgcgcagctccaccttatagttgcggatggagcgcacatattgcagattgaccacatcgctgcgccctacctgcaaaaagccgttttcgtacagcatggcgggcagatcagcgattttgccgtaaaaggtgcagatgggctggtgcggaatatcgccgtagacgttgatctgccgcagatcgctttccagataatagatctgatccagcggaatctcactggtggtgcggttatggtgcacctccagcgtttttcgggggtcggacatgccggaaaaaatatcctccagacagctgggcagctgggcggcaatatcccgcttgagtaggtagcggtaagcgttgaccgtgtagccctgcggggcaaattccagataagccgaaatgtacaccagcacgatatccggggcgacctgccgcagcttgcgtcccagtgcaatgccgtcggtggttttcaggtctacatccagaaacgccagctggtagcgttccagctccggggtagccagcagctgctcgccgctggtgcagacggtgctctgcacctgaatctcccgggcgcggaaccattccgagatgtactcgtccatccgcgcagcgaaggccgcatcatcgtcacagaccagaatgtgcatgggtgtgtttcctcctttttgaatacaaaaaagcatatagcagtgttccccgccgggagaagcaccctatatgcttttatattacacttgttccgcctgttcgtcaatcaaagacggagcagacgctgggatcacttatgcaaggaatttgtcgtagagaccaaatgcaaagatgaacaccacgatgagcggcagcacataagtcaggtagccgcgcatccagtcctgcaccttgagacccttgccggtgttgacctcttttttgtagttctgccagccccagccgtagcgggtaacgcagaacagcagatataccaggctgcccagcggcaggaagaggttgctgaccagaaaatcctctacatccagcacagcaccgccgaataccgcaaagccgtcccatgcccacaggttatagcccagcacacagggcatggacagcaggatgatgagcacaaggttcaccagactggactttttgcggctgcaaccggtcagttccatgccgcagcagatgatgttctcgaatactgccagcacggtggacatggctgcaaaggccatgaacaaaaagaacaggctgccccacagccgccccatggacatattggcaaagatgttgggcagggtgataaagatcaggctggggccgctggtctggtctacatggtaggtaaaacaagccgggaagatgatcaatccggcggtgatggctacgaaggtatccagaaccacgatacggacagactcgcccagcagagagtgttccttgccgatatagctgccaaaaatggacatggctccgatgccaaggctcagggtgaagaaggcctgattcatggcggagaccagtgtgttgaccacgcccacctcctgcatccgggtaaagtccggcacaaggaagaaggaaagaccctcctttgccccgggcatgaacaggctgttgacggcaagcaccaccataatgaggagcagggcgatcatcatgcccttggtcacacgctccagaccactttgcagacccttggcgcacaccagaatgctcactaccaccacaaataccatccagaaggtcatagtagcggggctggccagcatttcggtaaacttaccagccacctgctcggcgttgaggcctgccagctttccagcagcggtcatgtagaaatagtgcagcatccagcccgctacggtggtgtagaacatcatcagcaggtagcagccgatgagggtaaagtagccgtggatgtgccacttctgccccggcttttccagcgcctgatacgcccgcaccgggcttttgcgggaggcgcgtcccacggcaaactccatggtcatgatgggcagacccagaatgaccagaaagatcaggtagaacagtacaaaagcaccgccgccgccctgcccggcaatatacgggaacttccatacgttgccgatgccgatggcacagcctgcagaaagcagaataaagcccagacgggatttcagagtttctcgttccataatccgataactccttacttctgcttccggggtgcgtttttgcccacagggccgcggggacggcgctcagcagccttggactgctggacagcagagcgggtctgtgcacgacccttgaccgctgcggcgcgcagaccgttcacctcggccttggtgagctcgcggtaggtgccgggcttgagcatgcccagctttaccacgccttctgcgttgcgcttcagacgcaccacctcaagacccacgctctcgcacatccggcggatctcgcggttcttaccctctttcagggtcatttccatcacggtgcggccgggctcgtcggtgaccacgttgatagcacagggcatggtcttggtgccgtcatccagcacgacgccgctgctcagcttgaggatggtggcctcgtcggcgcggggctgcacggtaacgcggtacagcttggagataccgccggacggatgggtgacagcctgtgcaaaggcgccatcgttggtcatcagcagcagaccctcgctgtccttatccaagcggcccaccgggtacaggcgggcggggatgtcgctgaccaagtccatcacggtcttgcggccaagttcatcgctggcggtggtcacatacccgcggggcttgtacagcgccagataatacagctgctggtttttctggatgtagatgcgctcgtcatccacatggagcacgtcacggttggggtccatcttgtcgcccaccttgaccgggtggccgttcaccttgacgcggccctcggcaatgatctgctcggcggcgcggcgggagcacagaccctgctcggccatgatcttctgaatacgttcttctgccataatattactccttgtgcgcctcacggcgctcaaaacgcgcaccgctcccctgcttttgcggggcacggtgcgcggctatataaaccgcaggccaaaaggcctgcggctgcggttaggttgctataaagggttactctgccttaggctcctctgcgggtgccttatcgtcctttttgaccagcgtggtgagcttttccaccagctcgggcagcatggtcagggcgcggtcgatgctgttggagctatccgacagctggatggtgcgcacgcagccatccttgatgaccagaaatgccaccggctggatgttgacaccggcaccagagccgccgccgaacagatctttgttggcagcgttcttgccgttaaaatcggtaccgccggaagcgaagccgaagctcaccttggacaccggcagaatggtgatgccgtcctcggtggtgatgggcttgccgataatggtgttggagtctaccatctggtgaatcttttccattgtaacgttcatcaggccctgaataggatgctctgccataaaacaactctcctttattcatccgtgcaggcaacaggccgccggaaagcattctgagatagatttagtgtatcatcttcaaataaaaatgtccaatacttttttacgccagaactcgtacagcacccgcacagcggcaatgacgatgaacagcgcctgtgcgctgacccggaaggacaccttgtcctgcacagtaggctgggcgctgccgaagtccggcagaacgcgcagctggtcaaattccagaaagaagaaatggtccagcacgccaagggtcgggtacagccacgcttgcagcttgccgtaattgcgggcagctgcggcggggtcgtccccgcgcacaccaaggcagaccgaaatccttgtaaagcggagcgcgccaaacactgcccgcagcagcgtacccacgccccgcagcatggtgcagatcacatccagcgtgatctttgccttttggcggggcggcttttcagctttgggctttgcgggctgcgcagcctttttttcagcttttttgcgcttacgctccgcgcgccatgcgcggaattttgctttcagtctgccggtaaagcccttgggctcctccggctgggcgggaggttccggctttgggtattggaacaccggaaaagtgatgcccagtgccccggcctttacggtaagcgtatcgttttgccagcagacatccgcgcagaaggggcacagcagcaacagcgccgccagcaccaacaaaatcagcagcaggatgcccaccaccttgaggatgaacagcagacaagcgcccactgcggaaagaaccatgcccatggatcagccctcactttcggtcggatcatctgccggtgcatcgctgtgcaccggcggcaggtctgccagactggacaggccgaacacacgcaaaaaggtatcggtggtgcggaagctgaccgggcgacccggcagatccagacgtccggcttcctcgatgagccccttttccagcagaccggacacgctggaggaggaatccacaccgcgcacctgctcaataaaggcgcgggacaccggctgattataggcgatgacggtcaaggtctccatggccgcagggccaagcggtacggcgcggcggctgtccagcacgcggcgcacacagtctgcccactgggacttggtagccagctgccaccgggtattcagatgcagcagacacaggccgctgtcctcccgctgatagcgggtgtgcagggtctccagtgcggcatccacgctggactggggcagctgcaccgcctgtgccagcttatcggcacctatggggtcgccgcaggcaaaaagcatagcctccacggcggcaagggtttgtttctggttcatgggttctccttattgcgttccgggcgggtgcggcgcatggtcagcgctccccggtcgtccagcgcgatgcgtccgccgcgcaccagttccagcagtgccagaaaggtagctacgttggtgctgcggctctggctgcgggaaaacagctgctccatttttgccacggtgccgcccagcatccggcgcaggatgtacaccacccggctggtgaccgataccatgggcgcggtgaccagcggctcaaactgctgctgagtgggtacgcggcgggtcttggtgcggcctgccaacgcctgccagtagtccgccaagatctgcggggcgtggtgcaatgcgtaggtgttatcccactccacttccatgggacggcgcacgaataccggggcagcctccccttttgcgcgcagcagagccgccatgcggcggcactggtcgtactcgatgagctgaccggtgagttcctgcttcatgcgctcgccctcttcgctgcggggcagcaacagaaagcttttcatctccaccagatgcgccgccatttcaatgaaggcgctggcggtctcggggtcagggtcagcctgctccacggtgcgggtgtactggtcgatcagctgcaggatggggatattatgcaagtccattttatgtttggccaccagagccagcaataattccagcgggccgtcaaaatcttccagatggaaggtcaattcctctgccactcagatcaccgccccaaggctgctggcataaacggcgtaggcgatcttatcaatatacccggtgcctgcgcccaaaagcgaccacactacgttgttcaggtagtagagcggcgtatccagaaagccgccccacaccgctgccagcatgacgatcataatatatttttcataccgcatcaggccaaagtagatgcgctgcggcagcaccaccagtagaatgcggctgccgtccagcggcggcaccggaatcaggttgaacactgcaaggctgacgttcatcagcaccagatagcgcaggaacatggcaatgtaaatggtagcgttattgaccggcgcccagtagtacattaccttccatgccaccatgccaaggtaagctagcacaaggtttgccaccgggcctgccagtgccgtaagcgccatgccccacttggggtttttgaagttgcgggggttggtggatacaggctttgcccagcccacgcctgcaaacaccatgcacagggtgcccagcaggtcaaagtgcgcaaagggattcagtgaaagacgcccctcgcgtttggcggtggcatcgcccagcagccatgctgccagcgcatggccagcctcgtggaacggaatggccaccagcgccaccagtgcgcggatgatataataggttgcctgtgtggtcatgtaaatctcctgtcaaaacgaatttcttcttttataatactatttttttgtgccctgcacaagccccacagcaccgggaatgcaaaaagctgcaagaaattttaaaaaaggcttgctttttctttgtaactctggtaaaatagtcaagctgattattttgattccatacttcactgtaggaggtgcaattaccatggctaagtgtgaatgctgcggcaagggtgttacctttggtatcaaggtctctcactctcatcgccgttccaaccgtacctggaagccgaatgtccgtcgtgtcaaggcggtcgtggagggctctcccaagtatgtctacgcatgctcccgttgcctgcgcgctggcaaagttacccgcgctgtctaatttggtgtatgtggccggtcactttgtcgagtggccggcttttttatttgccgcaaggagtggaataaaatgtctttgcctgttgatcccatcatgctgctgagcgtggtgaacctgaaactgcgggatcagtataaagatctcgatgcgctgtgcgaggatctggaggccgacaaggccggtctgtgcgcaaagctgcacgctgtgggctacgattacgacccgcagcgcaaccagtttatctgattatagcttccaaatccggcaccggtgcgcaacgactgtgcccgggccggtgaatgataaaataaggagtgcttgatttatgatccagggtacctattacaaagagtggagcacggttcttggccgtgagatggagtttaaggtgtacggccatgccggtgtgccggtgctggcactgcccgcccgcggcggccgtttttacgactgggagaacaacggaatgcccgatgccattgcccagctgctgaacgagggcaaggtgcagctgttctgcgcggatgccgtggacggcgagggtcttttgaatggtgatctgccccagcgccgccgcgccgagctgcaggaaaagtatttcgtctacctgaccgctgagctggctccccgcattctgaccctgaacaacgccaaaaagggcacccggatctggactgccggtgtggacttgggcgcttaccacgccgtccactgccgcctgcgccgtcccaccctgtttgcaggtgctgtgggcatgggcggcatctacgacctgacccgcttctggggcaccgacagcgacgacatggtgctgcgctgctctccccttgcctatctgcaggaaagcggcattgccaacaagctggcattgaccaaggcagaagagaactgcctgatcctctgtgccggtcagggcgcctacgagggcgacgcactggacgatacgcaggcactggccgatctgctgaaggatcagggaatgcccgcacatctggaggtctggggcggtgacgtttcccacgactggtactggtggggcaagatgtggagcctgtttgcaccgcgcattctggaagtaaagtaagagcttacaacgagggaaagcctgcggggcttccctcgttttttatatacagcggttttgaatggcctccgcgtgcgctctggccatgttcagcggaatttcatcttttaatttatggtccagaaacgcctgcggcgtttctggaccattttttgtcagctgtactatttatatttcatttcctacttgaattgtcggatattatgtgctatactgctgttgcaagaaaatataccccatgggggtttatgaaaggagcgattccgatatggaagagaccaaaaagcactgttgctgctgcgttgatacgccggaagcggacgctgcggcagacactgctgtcccctgctgctgccgccacaaagtgcgcagcccggaggaacacaaagctctgctcaaccggctgaaccgtattgaaggacaggtgcgcggcatccgcgggatgctggaaaaggacgcctactgtgtggacattctggtacaggtagccgcagccaatgcggcgctgaacagcttttcccgggaattgctggcacagcacatcggcagctgcgtggcggatgacctgcgtgccggcagtgacgaaaagctggaggagctgctccggctgctgcccaaactgatgaaatgaccgcccgccgggcagactgaccacaaggagaaacaacaatggaacaattcaacgttaccggcatgagctgcgcggcctgctctgcccgggtagaaaaggccgtaaagagcgtgccgggcgttaccggctgttcggtaagcctgctgaccaactccatgggcgtagaaggcaccgctgaggatgctgccattatccgtgccgtagagcaggccggttacggcgcaagccccaaaaaagccgccgcagcggccagcaccagcgcagagctggatgcgcttgccgaccacgaaacacccaagctaaagcggcggcttatcgcctcgctgggctttttgctggtactgatgtacttttccatggggcacatgatgtggggctggccgctaccccgctggtttgacggcaaccacattgccatgggactggtacagctgttgctggcaggcatcgtgatggtgatcaaccagaagtttttcatcaacggcttcaaggggctggtgcaccgctcccccaacatggatacgctggtggctatgggctcgatggcaagctttgtgtggagcacctacgccctgtttgccatgaccgatgcgcagctgcacggcaacgaagaacttgtcatgcactatatgatggagttctattttgagtctgccgccatgattttgacccttatcaccgtgggcaaaatgctggaggcacgctccaagggcaagaccaccgatgcactcaagagcctgatgaagcttgcccccaagaccgctaccctgctgcgggacggcaccgaggtgaccgtacccattgagcaggtacagaaggaggacatctttgtggtgcgcccgggcgagaacatcccggtggacggcattgtgctggagggcagcagtgccgtgaacgagagcgcgctgaccggcgagagcatcccggtagacaaggccgtgggcgataaggtaagcgctgccaccactaatcagtccggctatctgcagtgccgcgccacccgcgtgggcgaggacaccacgctggcgcagatcatccgcatggtcagcgatgccgctgctaccaaggcacccattgcaaagattgcagataccgtatccggcttttttgtgcctgcggtcatcagcattgcagtggtcaccacccttgtctggctgctgctggggcgggatgtaggctacgcgctggcgcggggcatctcggtgctggtcatcagctgcccctgtgcgctgggtctggcaacgccggtagctattatggtgggcaacggccttggtgcgaagaacggcatcctgttcaagaccgctgcggcgctagaggaggccgggcgcacccgcatcgtggcgctggacaagaccggcaccatcacctgcggcgagcctaccgtcaccgaccttctgcccgctgaaggcgtgaccgagaccgaactgctcacgctggcagccgcgctggagggtcgcagcgagcacccgctggcgcgggcagtgctggcctatgcggaggaaaagcagctggagctgccctctgttaccgattttactgccctgccgggcaacggccttaccgccaagctggagggtaaggagatttttggcggcaacgctgcttttattggcacaaaggtctctatccccgctgcgctgcaaacgcaggctgctgcactggccgctcagggtaaaacgcccctgttctttggcggcgcaggtcgtctgctgggcgttatcgcggtagcagataccatcaaggaggacagcccgcaggccatccgggagctgcgaaatatgggtatccgggttgtgatgctgaccggcgataatcagcgcaccgccgaggccattggccgacaggccggggtggacgaggtgattgccggggtgctgcccgagggcaaggaggccgtcatccggcagctgcaaaagtacggcaaggtagctatggtgggtgacggtatcaacgacgcccctgccctgacccgcgctgacaccggcattgccattggcgcaggcacagacgtagccattgacgccgcagacgtagtactgatgaactccaagctgtcggacgtgcccgccgccatccggctgagccgcgcttccctgcgcaacatccacgaaaacctgttctgggcgtttatctataacatcatcggcattccgctggcagccggtgtgttcatccccttggggctgacgctgaaccccatgttcggcgcagctgccatgagcctttccagcttctgcgtggtgagcaacgccttgcggctgaacctgtttgacctgcacagcgcaaagcgtgaccacccgcccaaacacgtccctgccctgcccgctgcccttgtgcagcccgcagcggaggaagatacaactcaaaaggaggagaccgctatgaaaaagaccctgaccgtagaaggcatgatgtgcccccactgtgaagcccgcgtcaagaaggcgctggaggctctgccgcaggtggacgaggctgttgtcagccacgaagccggtactgccatcgttaccctgaacgcagaggtggatgatgaagtgctgaagaaagccgtggaggcacaggattaccccgttaccggtatccagtaaggttcagccaccacaaatgcaaaaagaggcagctgcgcgtattctgcgcagctgcctcttttgtagcgggacgatttgaatgcgcgccgcattcgctttgcgcatcttcagaggaaagattcttttttattttagagcaccggagcgtctgcggacgctccggtgctccatttttcccaaaaagccgttgccgcaattagaatgcaaaaagcccgctgcaaggcggaatatccttgcagcgggcagaatagataaccggggaacccttatcagacttcagtgttgaagtaacgcttcagcaggccctcgaagccacggccgtgacgggcttcatcctttgccatctcatggacggtatcgtggatagcgtccagattcagcgccttagccttcttggccaggtccatcttaccggcgcaggcaccgcactcggcctcggcacgcatcatcaggttcttcttggtgctgtcggtcacgacctcgcccagcagctctgcaaagcgggatgcgtggtcagcctcttcgtaagcataacgcttgtaggcctcggcgatctcggggtagccctcacgctctgccacgcgagccatagccagatacataccgacctcactgcactcgccctcgaagtttgcgcgcagaccatcaacgatctcctgcggcacgccctctgccttgccgatgccaacaacatgctcggtgacgtaggtattgccggtcttctccacaaaagcggaagcgggagccttgcaaacggggcactgagcggggatctcaccctcagcgatataaccacaaacggtgcaaacgtatttcttcataagaatttacctccattcgatctgttaaaaatgatacaggacggaaaccacccgcctgttgcttctatgctgggcagccgcgctgccgggtatagaaagagccatggaagggggctttgtgtacttccctttccatggctctattatagcgaataattcctagttagtcaagtatatttttaagaattattcctatttatcaaaatctggcaggatgcccaaatttccttacagaaaactggacgtattcccgaggatcagacctgcaggttgccgctggtagcagcatcagaaccggcggtagcgtcaaactcgtagtcattgccgggcaggatggcattgagcagaatgcctgcgatagcagccacagccagaccggacaggttgatggtgacactgccaacggtaaagccaacgccgcccacagagttgaagcccagtgcgcacaccagaatgacggcggcaacgatcaggttgcggctgttggtgaagtcaacgcggttctccaccacgttgcgcacaccgatagcggagatcattccgtacagcacaaagctgataccgccgatgatgccggtggggatggtgttgatgacagcctcaaacttggggctgaagctcaggatgatagccagcacagcggcaatgcggatgaccagcgggtcgtagatcttgctcagtgccagcacgccggtgttctcgccgtaggtggtgttggcggggccgcccagcagaccagccatggtggtggccagaccatcgcccatcagggtgcggttcaggccggggtcattgatgtagttgtggccgacggtggcgctgatggcagcgatgtcgccaacgtgctccatcatggtagccagtgcgatggggataatggtgaacagcgcactgatgaactccgggctgccgtcaatggcaaacagacccatagcctctttgtgcagggggatgcccagccaggcggcctcggagatcttctggaaatccactgcgccggtgaccagtgccactgcgtaggagaccagcacaccgatgaggatgggcaggatcttgaccatgcccttgccccagatgttgcacacgatgacagtgcccagtgccacaaaggccagcagccagttggactggcagttggtgatagcagagggagcaaggatcagaccgatggagataatgatggggccggtgaccaccggcgggaagaacttcatgatgcggcggatgccaaaggtggagatcagcaggctggccaccagatagaccagacccgagaatgcaatggcagcgcaggcatagggcagcatcttggtgttggcaacggtcaggttgccatcggcatcagccagcatgggagccacgatggagaagccgcccagatatgcaaaggaggagccgaggaatgccgggaccttctttttggtgatgaggtggaacagcagcgtgcccagaccggcacacagcagagtggtggaaacgctcaggccggtgagcagcggcaccagaaccgttgcgccaaacatggcaaacatgtgctgcacacccagaataaacattctgccggtgcccaactttttggcgtcgtatacgcccttggagtaatcgatcttttcgttcatagaaaacctcctatcctgttattcccaaaaaaagaggcattgccgttgaaacagcagtgcctctgaatttcaggaacaagacctccacacaaaaatgggaaagaaacagctatgcagtcgctcgcgcttgaacattgtgctcctccccttctttttgtgttctttccaacaaccggaaccgctccggcaaggcagcagcaacgccgcagcctttttgttaagtatagcagattttgggctttccagcaaggtgttgacagctttttcttgccggttacactgtgccgtgggctgcgggggttgcgcttttggacggaatgccctataatagagcctgttcttatttcctaccattataatgtgttgatattacaggaggctttatgctctatctggattattctgccaacacccctgtggacgaggaggtgctgcaatgcttctgcgaagctgagcggcgctacccgggcaacgccaacgcccaccatcaggcaggcactaccgcaaaggctgctataaacgaggcgaccggcagcattgcccgctgtctgggcgcaccgcctgcgggcatcatctatacctccggtgcaagcgaagccaacaaccttgccgtaaaggggctggcagcgctgggaggtgcagcaggcaggcacattctctcttctccgctggagcattcgtccgtcagcggcagtctggaggcgctgcaaaagcaggggtacgaggtggagctgctggacatcctgccggacggcacggtggacctcgctgacctgaaacagcggctgcgcccggacaccgttctggttgctgtgaccgctgtggacagcgagttgggtgtagtacagcccattgcagagattgcagagcttttaaaggcataccccaactgccatttccatgtggacgccacgcaggctgtggggaaaattcctgtgcagtttgagggcatggacaccatgagcctgacagcccataagttttacgggctcaacggcatcggtgtgctggtaaagcggctggggctggcactgccgcccctcatccacggcggagagagcactaccccctaccgcagcggcacacctaccatagcccttgcctgctcgctggcgctggctttggaaaaggctactgcggagctgccagcccgcgccgcaactgtgcgcagcctgaatgaccggctgcgtgcagagctttcccgctatccaaaagtacgcatcaacagcccggcaaacgctgtgccgcatatcctgaacctgagcgtgcagggcgtaaagggtaccgtgttccagcgggagttggacacacgcggggtatgcgtctcggtcaaatccgcctgttcgtccgatgggttgccttcccgcgcagtgcttgcagtcagtcaagaccggcgcaacgccctttcctcctggcgcatcagcctgagccacattaccacagaagaggaagtgaccgcctttctgcacgcctttgcagactgctataacaccctgacccagtaaaggagctgtgaaacaaagccgtttgcagctgccataaacaaacaaaaagaccttcccgctctccggaacgggaaggtctttataaattgctaattagccttggaacttacgttcaaggacaaaatcactcaatgatcttgccaacaacgccggaaccaacggtacggccaccctcacggatagcgaaacgcaggccctcttccatagcaacgggggtcagcagctcaacgtgcatcatgacgttatcgccgggcatgcacatctcggtgccttcgggcagggtgatgatgccggtcacgtcagtggtacggaagtagaactgaggacgatagttggagaagaagggagtgtgacgaccgccttcgtccttggtcaggacgtagacctgagcctcaaagacgttgtgggggtgcacagaaccgggcttagccagaacctggccacgctcgatctgggaacgatcaacaccacgcagcagagcgccgatgttatcgccagcctcagcgaagtccagagacttacggaacatctccagaccggtgatggtggtgttcagacggtcgggcttgatgccgacgatctccatagcatcgccaaccttggccataccacgctcaacacgaccggtagcaacggtaccacggccagaaatggtcatgacatcctcgatgggcatcaggaagggcttgtcctcctcacgatccgggttggggatgtaggagtcaacagcgtccatcagctccttgatacaagcgtaagcgggatcctcaggatcgttgggagcctccagagccttcagagcggaaccacgaatgatcggggtgtcatcgcccgggaagtcgtactcgctcagcagctcacggatctccatctcgaccagatccagcagctcctcgtcgtcgaccatatcgcacttgttcatgaacacaacgatatagggcacgccgacctgacgagccagcaggatgtgctcacgggtctggggcatgggaccatcggtagcagcaacgaccagaatagcgccgtccatctgagcagcaccagtgatcatgttcttaacgtagtcagcatggcccgggcagtcaacgtgagcgtagtgacgcttctcggtctggtactcaacgtgagcggagttgatcgtgataccacgagcacgctcctcaggagccttatcgatgttagcgtagtccatgaactctgcatcacccttcagagccaggtacttggtgatagcagcggtcagagtggtcttgccgtggtcaacgtgaccgatggtgccgatgttaacatgcggcttagaacggtcgaactttgccttttcagccattggaatatcctcccttaatttaggttttgatattggttacaacaaccctgcaaaatgcagacattgcactgcaaggctattctactaaatttgccctgtaaaatcaagtgcttttacaggaaattttgccggagttacactaccccggcaaaattctcatgcttttcagcgcttagcccttggtacggccagcaatgatctggtcagcaatgttcttgggaaccggctcgtagtgagagggctccataacatactggccacgaccctgagtcttggaacgcaggtcggtagcgtagccgaacatctgagccagaggcacaaatgcgttgacacgctgggtaccggccatagcctccatgccctggatctgaccacggcgagcgttcaggtcaccgataacatcgcccagatattcatcaggaacgataacagcaaccttcatgatgggctcggtgatgataggatcagccttgcgcatagcatccttgaatgccatagagccagcgatggagaaggccatttcagaggagtcgacctcatgataagaaccatcccacagggtgaccttaacatcaacaacaggatagcctgccagaacgccagccttcatagcaccctgaataccgttgtcgatagcagggatgtattccttcgggatagcgccgccaacgatagcgttgacgaactcgtaacccttgccgggctcgttgggctcgatcttgatcttaacgtgaccgtactggcccttaccaccggactgacgtgcgtacttggtctcctggttggcctccttgcggatggtctcacggtaagcaacctggggtgcgcccacgtttgcctcaaccttgaactcgcgcagcaaacggtcaacgatgatctccaggtgcagctcgcccataccagcaataatggtctggccggtctcttcatcggtgtaggtcttgaaggtcggatcctcttcggccagctttgccagcgcgatgcccatcttctcgttaccggccttggtcttaggctcgatagcaacgcggataacgggctcggggaacttcatggactccagaatgatgggatgattctcatcacacagagtatcaccagtggtggtgttcttcagaccgacaacagcagcaatatcacctgcatagcagcagtcgatatccttgcggtggttggagtgcatctgcaggatgcggcccatacgctccttgctgtccttcacagagttgtaaacagtagtacctgcctcaaccttaccggagtacacacggaagtatgccagcttaccaacgaacgggtcggtagcgatcttgaaagccaaagctgcgaagggagcgtcgtcggaagacggacgggtctcctgctcttcggtctcaggattcacacccttgatgtcctcaacatcggtaggagcgggcatatagtcaacgatagcgtccagcagcttctgcacaccgcggttcttgtaggaagagccgcagacaacgggaaccagagtatttgcaatggtttccttgcggatggccttcttcagctcctcgcgggtgatctcctcgccctcaaggtacttctccatcagctcttcgtcgttctcggcaacagcctcgaccagaatgttacggtactcttcagcctgctcgaccatatcctcggggatgggctcggtacgcatatcgttgcccatgtcgtcgtagtagacctcagcgttcatatcgaccaagtcaacgataccgcggaaggtatcctcctgaccgatgggcagctggatggccacgccgttggcgtgcagacgatcatgcagcatcttgatgcagcggaagaagtcagcacccatggtgtccatcttgttgacgtacaccatacgggggactttgtattcatcagcctgacgccaaacggtctcagactgaggctcgacaccaccctttgcggccagaacggtcacagaaccgtccagaacgcgcagagagcgctggacctcaacagtgaagtccacgtggcccggagtgtcgataatgttgatgcggtgacgattcttcttgaacgcgaccggatccttctgggtctcggagtgagaccagtagcaggtggtagcagcggaagtgatggtgataccacgctcctgctcctgaaccatccagtccatcgtggcaccgccatcgtggacctcaccgatcttatggttgataccggtgtagtacaggatacgctcggtagtggtcgtcttgccggcatcgatatgagccataatgccgatatttctcgtcatctgaagagaaacttctctgggtgtagccatgaaattaacctcctacagaacagatcaataacggaaatgtgcgaaagccttgttagcttctgccatcttgtgagtgtcctcacgcttcttcacggcgttaccagtgttgttggcagcatccatgatctcagcagccagacgctgtgccatggtcttctcaccacgggtgcggctgtaggcagtcagccagcgcagacccagagtctcgcggcgagcggggctgacctccaagggaacctggtagttagcgccaccaacacggcgggtcttgcactcgaggctgggcatgatgttctccatcgccttctcgaaagtctccagaggatcgttgccggtcttttcctgaatcatggagaaagcttcgtaaacgatcttctgagcgacgcccttcttgccatccagcatgacgctgttgaccaagcgggtgaccatcttggaattgtaaataggatcagctaagacatcgcgcttagcaatgttacctcttctaggcatctttcttccctccttcacagaatgatatcatcggtactcgaaagtaataaaactcccgttgtgtcacaaagagctgaccttacataaaccgttaccctccgcttttaagcggacttgttatttatataaaggaaagccgtttatggcggttgtcctcaattacttctttgcagcaccggccttaggacgctttgcgccgtacttggagcgggcctgattacggcctgccacaccctgagtatccagggtaccacggatgatgtggtaacgcacaccgggcaggtccttaacacggccgccacggatcagcacgacggagtgctcctgcaggttatggccgataccgggaatgtaagaggtgacctcgataccattcgtgaggcggacacgagcaaccttacgcagagcagagttaggcttcttgggggtcatggtacgaactgcagtgcagacaccacgcttctgggggctgctcagatcagagtactgcttcttctgagagttataagtcttctgcagagcgggagcggtgctcttggtagtcaggacctcacggcctttgcgtacaagctggttaaaagtaggcattttgtttctcctttcttaatgatgaacatcggaagattttccgacttttttgccgcactatccccatgagggacgcgcaacagttatataatacccgctttgcggccggatgtcaacagtttttgcaaatttttttgtatttattccagattttttctttcagacagtttttggcagaaaaagtgccttttccatcccctgctgcgctgcctttggcacgcaaaaaccgccccgcaggctttcgcccacggagcggttttgtttaacggatcagatcctgacagatgccgcgcttactgtgcggaggcagccagctcggctgcgatctcggcatcgcgctcagcctcacggttcttcagatcctcacgcacctccggcagaccggtaccggcggggatcagcttaccgatgatgacgttctccttcagaccggacagcgggtcgaccttacccttgatggcggcctcggtcaacacgcgggtggtctcctggaaggatgcagcggacaggaaggagtcgttggccagagcagccttggtgatgcccagcagcacctgctggtactccaccagcttcagaccctcttcgcctgcatcaatgcgcttctgcagatcggcattgatgttctccacctccagacggcttgccagagcaccgccgatcaggttggaggagccggagtcggtcacgcgcaccttgcggcacatctgacggacgatgacttcgatatgcttatcgttgatctcaacgccctgcagacggtagaccttctggacctcgttgatcaggtagttctgcacgtcctccagacccttgatggccagaatatcctgcgggtacagcacgccctcgcgggtgatgatgtcgcccttctccacacggtcgccgggcatcacgcgggaatgctgggtgaacgggatggagtagctcttgacttcctctgcaccgttctcgtccttgccggtgaccttgatgaccacgttcttcttggtgtcgtcctgagagaccacaccggagatctcgctcatgatggccatgctcttgggacggcggctctcgaacagctcctcaacacggggcagaccctgtgtaatatcctcggcagatgcgataccgccggtatggaaagtacgcatggtcagctgagtaccgggctcgccgatggactctgcggcgataacaccgacagactcgcccagacggaccggctcgccgttggccatatcggaaccgtagcagcgtgcgcagacgccggtctttgcacggcaggtcagcaggctgcggattttcagacgggtgataccggctgcctcgatctcgttggcatcgtacaggtcgatcatcttgccctcgggcacgatgaccttgccggtgatgggattgaccacatcgcccacggcaaaacggccgatcagacgctcgcggaagctctcgatcttctccttgccctcgtggatctcagagacccacaggccatctgtggtgccgcagtcgatctcgcggacgatgacgtcctgagaaacatcgaccatgcggcgggtcaggtaaccggagtcggcagtacgcagagcggtatcagccagacccttacgagcaccacgggcagaaacgaaatattccagaatgttcagaccttcgcggtagtttgcacgaatgggcatctcgatggtgtgaccggcggtgtttgccagcaggccgcgcataccagccagctgcttgatctggttcatagaaccacgagcaccggagtctgccatcatatagatctcgttgtccttgggcaggttgtctgccagagccttggagaccttatcggtggtcttctgccagatatcgatggtcttgttgtaacgctcgttatccgagatcagaccacggttgaacagcttgccgaccttggcgatctccttatcggcctcggcgatcagctcctgcttctggggcgggatcacagcgtcgcacacagccacggagatagcggacagggtggagtacttatagccctgtgccttgatggcatccagcatcttagcacacttgcgggtgccgttgcgggtcatgcagcgggagatgatctcgggcagggtctttttggtcacgcggaagctgacctcgtactccagccagtgctcgggatcggtacgatccacatagcccaggttctggggaatgggattgttgaagatgatgcggccggcggtggcatccaccagaccggtgcgctccacgccgtcaatggtcatggtgcggcgcaccttgatgggcgcgtgcagggtgatgacgtgctcggcgtaagccatcagaacctcgttctcatcacggaacaccttgcctgcgccctcgtcgttctcgcggacggtggtcaggtagtagctgcccagaatcatatcctgcgtaggcacggtaacaggtgcgccgtcagagggtttcagcaggttgccggaagccagcatcagcatcttggcttcacggcaggcatcctcactcagaggcagatggactgccatctggtcgccgtcgaagtcggcgttgaatgcggtacaggccagcgggtgcagcttgacggcacggccttccaccagcacggggttgaaggcctgaatgcccagacggtgcagggtaggtgcacggttcagcagcacggggtgacccttgataacggtctcgaggctgtcccagacttcgggctttgcacgctcgaccatcttgcgggcggacttgatgttgttggcaatgcccttctccactagatccttcatgacaaagggcttgaacagctccagagccatctccttgggcagaccgcactgatccatcttcagctcagggccgacgacgataacggaacggccggagtagtcaacacgcttgcccagcaggttctgacggaaacggccctgcttgcccttcagcagatcagaaaggctcttcagtgcgcggttgttggggccggtgaccggacggccgcggcggccgttgtcgatcaggctgtccacagcctcctgcagcatccgcttctcgttgcgcacgatgatgtcaggagcgcccagctccagcaggcggcgcagacggttgttgcggttgatgacgcggcggtacaggtcgttcaggtcggaggtggcaaagcggccgccgtccagctgaaccatggggcgcaggtcaggcggcagcacgggcagcacatccatgatcatccactcgggacggttgccggagatgcggaaagcctcaacaacctccagacgcttgaggatgcgcacgcgcttctggccggaggacttttccacctcggcggtcagctcagcgctcagctgatccagatcgatctccttcagcagggtctggacagcctcggcgcccatggcagcctcgaactcgtcgccgtaacgatcgcgcatttcgcggtattccttctcggtcagcagctgctttttatccagcggggtcagaccgggatcggtgacaatatagcttgcaaagtacagcaccttttccagcaggcgggggctgatgtccagcatcaggccgatgcggctggggatgcccttgaagtaccagatgtggctcacaggagcggccagctcgatgtgacccatacgctcacggcggaccttggccttggtgacctcgacgccgcagcgatcacacaccttgcccttgtaacggatgcgcttgtacttaccgcagtggcactcccagtccttggtaggtccaaaaatgcgctcgcagtacaggccgtcacgctccggcttcagggtgcggtagttgatggtttcgggctttttgacctcgccgtagctccaagcgcggatctgctccggggaggcaaggccgattttaatggaatcgaaaacgttgttttccatgaaacgaaccctttcttaatctctagttgtttcgatgatacaggcggcttttctgttacaggatcacaggcgcttctcccctgccgcagcacgcggccaagggggaaggctgtgttgtgtatccaaatcagaaatctacttcgtcagaagcagccggagcctcggcaccggagttgtcatcctccagcacagaaggatcatcgaaacctgcatcggcgtccttgatgttgtaatcagtcagttcgctctcctgcaccacagtctcggtaccggcaacgtcacgcatatcaaagccggtctcttcatcgtcgaagttctggcgcatatcgatctcgttgccgtccttatcctgcacgatcacgtccatacccagagactgcagttccttcagcataacgcggaaggactcggggatgccgggctgcgggatgggctcgcccttgacgatggcttcgtaggtcttgacacgaccctccacatcatcggacttgacagtcaggatctcctgcagggtgtaagcggcgccgtaagcttccagtgcccagacctccatctcgccgaagcgctgaccgccgaactgagccttgccgcccagaggctgctgagtgaccagagagtaggggccggtggaacgggcgtggatcttatcgtcgaccaggtgatgcagcttgaggtagtacatataaccaacggtaacgcggttatcaaacttttcaccggtacggccatcgtaaacggtggtcttgccgtcacgatccagctcgatcttggagaagtcgatgatgtggcccttctcgcccatgatcttgggcagcttggtgggatatgcgggagcattctcgccgtgccacatctcgcgggcggtatcaaaagtatcgccgatgtcgttctcacgggcagagtcaaagacaggggtcatgaccttgatgccgcaggccttggcagcgtagccgaggttgacttccagcacctgaccgatattcatacgggaaggcacgcccagcgggttcagcacgatgtccagcggagtgccgtcgggcaggtagggcatatcctcctgcggcaggatgcgggaaacgacacccttgttaccgtgacggcctgccatcttatcgccgacgctgatcttacgcttctgagcgatatagcagcggacgacctcgcgcacaccgggctgcagctcatcgctgttctccggggtaaagaccttgacatccacaatgatgccgtatgcgccgtggggcacacgcagagaggtatcgcgcacctcgcgggctttctcaccgaagatggcacgcagcaggcgctcctcagcagtcagctcggtctcacccttcggggtgaccttaccgaccagaatatcgccgctcttgacctcggcaccgatgcggatgatgccgcgctcgtccagatctttcagggcgtcctcagaaacgttggggatgtcgcgggtgatctcttcgggtcccagcttggtatcgcggctctcggtctcgtactcctcgatgtggatggaggtgtacacgtcctcacgcacgatcttctcgttcagcaggacggcgtcctcgtagttgtagccctcccaggtcatgaagccgatcagggcgttcttacccagagagatctcgccgttgcgcattgcggggccatcggccagcacctgaccggcggtgacggtctcgcccacttctacgatggggcgctggttgatgcaggtgcctgcgttggagcgggcaaacttgatcagagaataatcctccagagcgccctgctcgttgcgcaccacaacatggtcggcatcgaccttttccacaacgccgttgctcttggccagcacagcagtgccggaatcggtagcagccttgtactccataccggtagcaacaatgggctgctgggtgaccatcagaggcactgcctgacgctgcatgttagagcccatcagtgcacggttacagtcatcgttctccaggaaggggatgcaagcggtagcaacagagaccatcattcgcggagaaacgtccatgtaatcgaccttctctgcgtcgatttccaagatctcgtcgcggcggcgggcagacacacggggacggatgaagtgcttgccttcatccagcggctcgttggcctgtgccacaacgtactcgtcctccacatcggcggtcatatactccacctcgtcggtgacgacctgctcgatgaggttgttgttctcgtcgtagatcttcttgaccttgcggtagggagcctccacgaagccgtactcgttgatcttggcgtaggatgccagataggagatcagaccgatgttggggccttcaggggtctcaatggggcacatacggccatagtggctgtaatgaacgtcgcggacttcgaagcctgcgcggtcacggctcagaccgccggggcccagagcagacagacggcgcttgtgggtcagctcagccagagggttattctgatccatgaactgagacagcggagaggagccgaagaactccttgatggctgccaccacaggacggatgttgatcagtgcctgcggagtgatgacgctctgatcctgactctgcagggtcatacgctcacggatgacgcgctccatacgggagaaaccgatgcggaactggttctgcagcagctcgcccacgctgcggatacggcggttgcccagatggtcgatatcatcggtggtgccgatgccgtagcccagaccgttcaggtagttgatggaggacaggatatcgtcgatggtgacggtacggccgatgagcaggtcgtgatccttcttcaggctctccatgacctcctcggcgctggaggcgttatcaaggatcttgcgcagctccttgaggcagcagcgctcgttgatgccgcactccttgacatccacacccttgaatgcggggtagtagctgtcgatgatggcctgtgcatccacgcagccgttggtgatgaccttgaccttgtggggctgatccttcatgggatcatcgatcttcagcacgaccagattcacgccggcagcatcgatccgctcggccagcttgcggtcgatcttcttgtcggcctcgacaaggatctcaccggtgaagggatccaccacgttctctgcggccacatggtccatgatgcggcgtgccagagacagcttcttattcatcttatagcggccgaagcgggacaggtcgtaccggcgcggatcgaagaacagcatatcgatctggctggtagcggactccaccgtggggggctcgccggggcgcagcttgcgatagacctccagcaggccctcctcgcggttcttggtggtatccttttccagcgtggccagaatgcgctcgtcctcgccgaagtagttcaggatatcctcgttagaggacaggcccagtgcacggcacagcacggtgacgggcagcttgcggttcttatcgatacggacatagaacacgttggcggcatcggtctcgtactccagccatgcaccgcggttggggttcatggtggcgctgtacaggtcgttgccgaccttatccttcgcatggccgtagaacacaccgggagagcggaccaactggctgacgattgcacgctcggcaccgttgatgacaaaggtgcctgcgtcggtcatcagggggaagtcacccatgaagatctcctgatccttcacctcgccggtctccttgttcagcagacgggcggtgacgcgcaggggggctgcaaaggtaacgtcgcgctccttgcactccttgatgctgtacttcggctccttatccagccggaagtccacaaagctcagtgccagattgccggtgtagtcctcaatggtgccgatatcgtggaagacctccttcaggccttcatccaggaaccactgatacgagttcttctgcacctcgatcaggttcggcatactgatgacttcgtcgatgtgggagaagctcatgcgctcggttttgccgagctttacgggcttgactttcatcataaaatcaaccactccttacttttatattctacgggatgtcgtatacgcgggtcaaatttgagcagacacacataattcgacccgcgtcctgtggaaccttccggcattttgcacaaacttttcggggtgacccctcaagtggcagccatcacagctccctttttgacgcactagtccattatgtgatactaatgtagtatacaccccaaaactcctgttgtcaagccatttttcagttttttgccgaaataaattttattttcggtttgttttcgaacgcccggtagcgtgtagccgtttactttccaagtacttgatttttttattttgcacgttcctgttcataacacccttgtgcaatttgtctatctttgctcttgcgcccggaggtattacttttccacttccccgccgcaaaagaagaggccgccgcacggaacgccgtgcagcggccttgtcctattatacagaatgctcactcgtccagataatcccgcagcagctttgcgcggctggggtggcgcagcttgcgcagcgcctttgcttcgatctgccgcacccgctcccgggtcacgttgaactccttgcccagttcttccagggtgcgggcgcggccatcctccagaccaaagcgcagggtgatgaccctctcctcccggggcgtcaggcttttaaggacgtgcagcagttcccgccgcagcagctggcgcccggcttcgtccaccgggacaccggcgtcctcgtcctgaataaagtcctccagatgagcgtcctcttcctcccccaccggcgtttccagactgatgggttcctgcgacagttgcaacagttcccgcaccttgtccggctccatatccagtgcggcggcgatctcctccacggtgggctcccgcccatttttgtgcagcagatcgcctgccgttttcttgacccggttgatgctctccaccagatgcaccgggatacggatggtgcgtccctgatccgcaatggcgcgggtgatggactgacggatccaccaggttgcgtaggtggagaacttgaagccccgctccggctcaaacttttcagcagccttcatcaggccgaggttgccctcctgaataagatccagaaaaggcaggccccgcccggcatagcgcttggctactgataccaccagccgcaggtttgcctcactcaaggcgcggcgggcatctgcatcccctgcccgggcggcctttgccagcgccatctcctgtccggcggtcagcagcggcacccggccgatctcctttaaataggtcttgaccggatcatccagtgccacaccctccgaggaaagctcattctccagcctgccgatctgggcatcatccagcacaggcagctcggcaggctcctcctctgccagatgaacgccccgctgctccagcgccgcgtaaagctcgtccagctgtgcaatatcaaaatccgcttcttccatggcacggctgatctgctccgtggtcagggtgtgacggtgagcctttgcggcaaggctgcgggcaagttcttccgtttgcgacaatttctgcatgattcctgctccttttctctccagctccagccggagggaaaacagggatcagtcttgttcgggcagcgtcccctgctttttttcgcgcatcgactgaagatactgtgtgatctcatcgccagacattgcagcagctttgctagcaaccggcattccccgggcgatcctgtccagatacagacggatatcgtccggggtgcagttcacatcgctgtattgtgccgcaagccggctcagttcattcaatgcttcttcgcttacaaatgcccgtagtgcagtcaggctgagttccacgccctcccggctgcaattgagcatcgcttcgtatagttccttctgctgcggctggatgaattgctccgccgtcagctgctgcttggccagttccagatagcgaggctcccgcagaatagcagccagcagccgctgctgggcgctggcgatgcccagcgcctgactgccgcctgcgctgtaaggcaccttgatctgatccatctcaccggagcgcagcagctcgcggtttttctcccggcggtacttgccgcccgcccgctttgctgcggtacccagctgcgccaaaatggcagttttggagatgttggtctcctctgccagccgcccggcgtacacctcctgctcggtagggttagagcgctcggccagcatctccacggcttcctttacatattgcagccgctgcgcatcctgcgagagatcatactggtctcgcaggcgcttgagccggaagtccagcgcattgcccaccccatccagaagtgcctgaaagcgctccgggccgtattttttgatatactcgtccgggtcctttgcgccgggaatctgcaaaacgcccacctttaccgggctgttgcggaacagttccagcgagcgcagggtcgccttctggccagcctcgtccgagtcatagctcagaatgacctcatcggcatattcgctgatgatgcgcacctgtccgggggtcagggcggtgccgcaggcgcagacggcggtatcgatgcccgcctgctgcatactgatgacatccatgtagccctcgcacagcacgaaccgccgggaggcgctgcgcttggcgatctgcatggcaaacaccgtctcggatttgtggtagaccagcgtttccgggctgttgacgtatttgggcttggagtcgtccatcacgcgcccgccaaaggcaatgatgttgccgcgcaggtcaaagataggggtcatgacacgcttccagaacagacagtagatgcgcccggactggctgcgtttgaacaagccgctggcgtccagttcctgctggttgtagcccttatcccgcaggtactggtacagtgcctgcccatcgttgggggcatagcccagcccgaaccggacgatggtcttatcgtccagcccgcgccgccgccagtaagcgcgcgcctgccgtgcctcctccacggtagagttcaggcaggcgtggaagaagcgggcggcctccttattcatggaaagcacccggctgcgcagacgtccggtcttgtcgtcctcctgcggctccggcataccggcgcgggaagccagcatcttgatagcttcgccgctgctgatattgttgatctttttgacaaagctgatggcatctccggctgcctgacagccgaagcagtaaaagctttgagtgtcagggtacacatagaaggacggcgttttttcgctgtgaaaggggcacagaccgccgtatagccgtcccttgcgcttgagctgcacatagctgcccaccagctccacaatgtcggtgcggcgggtgagctcctcgatgtattcgtgtgggatcatgttgttttaaacgacctctccagttttaaaggacgtgccatttctggggcacgaacagttcttcaaaggtgcggatggcaaactcgtcgctcataccgctgatgtagtcggtgacggcgcgttcccgtccctcctgataggccagctgcacataaaagttggacatctgatccacatgggtcaggtagtactcgtacagttccgcgataagcttgtccaccttctgctcctcgcgcttggcgtttttgtccacatacacggtggcgtacatgaaatcccgcaaagcgagaaaagcctcgtattcctcggtgcccatgcggacatcttcctcgctgtgggtgaggatgctgttgatcatagtggtgatgcgggcggacttagtctgccccagcactgccgtgcagtccttgggcagggtggcagcgtccagcacaccggcgcgcacggcgtcctcaatatcgtggttgacaaaggcgatctgatctgccaagcgcacgatgcgcccttccggagtggccgcccatgtgcccttggtgtgggtaacgatgccgttgcgcacctcccatgtcaggttaaggccctcgccgtccttttccagccggtctaccacacgcaggctttgcatataatggtggaagccgtccgggcagagagcgttcagtgccttttcgcctgcgtgtccaaagggagtgtgccccagatcatgcgcaaggctgatggcctcggtcagatcctcgttcaggcgcagaccgcgtgcgatggtgcgggcgatctgcgaaacttccagcgtatgggtcaaccgggtgcggtacaggtcaccttccggcgaaaggaacacctgcgttttctgcttgagacgccggaaggccttgcagtgcagcacccggtcgcgatcccgctggaacaccgggcgcagcgggtcctgcggctccggtacggcgcggccacggcttgcatcgctgaaggtcgcccacggtgcaaaggtaaggtgttcgatctcctcggttctccgacgcacatccatacagatcctccttttgtttttcgggcttctcccctcccctctgcgcacagccgatcccaattgctgcgctacggcaattgtaacacatcggccatgtcgaagggggaagttccgtgtcggtttgcaaaaaagactttgttttttaaaatggtgcgtagaacgggtcagacaccgttacctgagcgctgccccgggtcagttctcgcagctgctccagcagcggggcttcggtatgctccggcatctgccagcgcagggtgacccggtctgtaaactccggcggtgcctgctttgccccggcggcgtcaatgagcagagatgcacgctcgtaaagggcgtagtccactgtcacttgtaattccaccacgctgcgcacagtgaccacctcggcgttttccagcgcacgggcagtggcggtagtgtaagcgcgcaccaagccgccggtgcccagcagcaccccgccaaagtaacgggtgaccaccacgatcaggtctgtcaggccgctgtgctgcaacacttccagcgcgggcgtaccggcggtcttggccggctcgccgtcatcggaatagcgctcgcggttgcccgcccgcaggcggtaagcgtaaacgttgtgccgcgcggtgcggttagccgcccgcacctgctccagaaaggccacagcggcttcctcactgtcagcaaaggaaagctgtgcgataaagcggctctttttctcttcgtattcaccggtggccgtgccccggacggtgcggtaatcctccacgttagatcctcctgataataactcagaataagtataacacaaacgggcgcaaataaaaagactgacgaagccttgcggccccgccagtctttttataagaagaaagcagttaatcacttggtaaagatctggatccactgatggccccaagtgctgttgctgttgtagtagtaaccaacactcatcttgcgagcctcagggttcaggatattggcacgatggccttcggagttcatccatgcgttgacgacctcttcaggagagacgctgccccatgcggcattctcgccggtgggggtatcggtgacgccatagtccttcaggacggtgaagcacttagagccatcgggacggacgtgggagttcacaacggcgatctcctcggcgcgggtctgtgcagcggcggtcaaagcgtcatcgcccattttcagagcagtcagaccatactttgcgcgctgggcattgaccagattcagaacttcctgacggtaatcctcggtgtgagaattttcggggtaagagaagatcagcacccagtagttattgtaaacgccgccctcatagtagccaacgctcacggtggtagcatcggcgttcaggatacgctcacgggtgaagtcggtagccatccactgatccattgcggaatcaggggtggagcagccggccatgtagttctcgccgatggagacatcgctgatgccgttctctgccagaacggtgaaatcgcgctgaccgttgggacgaacgtaggagtaagaaactgccagctcttcggcacgctccattgcagcggcgttgtggttgctgtcgcccagagcaacaggagccagaccagcctgtgcacgctcgttattgatcagggtcaggaagctgcgctggtaagcgtcttcctcaaagtaggagttctcttcttccacagaagcggtggcaggcatggcagcctgtgcagcgtttgcggtgacgggcttgaagcctgcaaagccaaaaaacacagccagcgtcattgcagctgctgcgatattcttcacggtattcattgcacgcttcataaaattgcctccggtctgttgccttatgcagtgtgatcttggatattgcaactcgtttgcaactcgtttgcaactctgtcgtatcacatccgcaactcttgtgcaacaagagtatcacaaagccatacagacgtcaagaggtttagagcttgatttgcagaaaaaatacagattttttaaaaaattctcgcctttttatcgcaactcaagcgtaacaaagagtccgaaaacgttacagttgtgttgcgcttctcgccaaaacaagtcaagtgcaacagcttccgcacactttttgggacacttcggtgcgtttcgttttgtatatcgctgtatttatatgcaccgctttgcatatcgtggtttctgtgtacgtttttgtggcgcttcgctgtgttcccttctgcgttcctttcctgtggagcaaatcggagctgctgtgcagtggctggcacaacagctcctttataaaaaacacaaaaaagaggccgctgcacaaaaatgtgcaacggcctctcacaattcaggctatgctattgaacaatgctcaggaacaggcgatcacagagcagcctttgctgcctcgatctgcttgatcagctcaggcacgaccttgaacagatcgcccacgatgccgtagtcagcaacgccgaagatgggagcaccctcgttcttgttgacagcgatgatgcactcagaatcctgcataccggcggtgtgctggatagcaccagagatacccagagccacatagatcttggggtgcacagtcttgccggtctgaccgacctgatggtcagcggtcatccagcctgcatcggtgacggcacgggaagcgcccacgacaccgccgcccagagcggctgccagctgctcggccagctcgatgcccttgttgacatccttgctgatgccacgaccaacggagacaatgacatctgcgccgatcaggtcgaccagcttctcagcggccttctccacgctcagcacttcggtcttgatgtcctcagcggtcaggctgaaggcgggcttgacgatctggcaggcatcagccttggcctgatcgaagggagccttcttcataacgccgggacgcacggtggacatctggggacggaagcgggggcagatgatggtagccatcagatggccgccgaatgcgggacgggtcatcttcaggttgcggtcttccatatcgaacttctgcttggacaggtcgatggtggagctctccttcaggaagtcgatgtactttgcagtatcgatatccagatgggtagcgtcggcggtcaggccggtgtgcagacgggctgcgcagcgggggccgaggtcacggccaatgttggtagcgccgatcagcagcacctcaggcttgtactcgttgaccatatcgcacacgacctttgcgtatgcgtcggtagtgtaatccttcagcagggggctgtcgcagaccagaaccttgtcggcaccgtagccgcccagttccttggcaatgccctcaacgttgtcacccagcagcaggccggtgacctcgcagcccagctcgtcggccagcttacgggcctcgctaaccagctcgaagtcagtggacatcagtgcgccctggcgctgctcgcaaaagacccatacgcctttgtattcgttaaaatcagccattgtaatcctatgctcctttcatcagatcaggtgcttcttggccaggatgccagccagctgggcggcaacatcgtcgccctgcagcatggtgcctgcgcccttctgcggaggagtgaaggacttaaagacgttcgtcggagaacccttcaggccaatggtgtccacctcgatcagcggatcgtccttcagtgcgttgtagtcgaacacttccatgggcttatcatagcaggtaaagataccgttcacgctcatgtagcgggggtcgttcagctccttgatgcaggtcagcaggcagggagtctgcaccttgaccatcatgtagccgtcctccagcatacgcttcacggtcagggtgttgccgtccttctggatgtcggcaacataggtgacctgcggcagatgcagcttttcagcgatctgggggccaacctgtgcggtatcgccatcgattgcctgacggccgcagaacacaacgtcctcggggccaacgccgatcttgttgacagcagcagccaggatctggctggttgcaaaggtatcggaaccgccgaactcacggccggagaccagaacagccttatcagcgccgcgggccagcagctcacgcagcatgccctctgccggcgggggacccatggtgacaacaacgacctcgcagccggtggcgtccttcagtttcagggcggcctccagagcgttcaggtcatcggggttggtgatggttgccatggatgcacgatccagagtgccatcgggcttgacggacaccttgccggaggtatcaggaacctgttttacacaaacaattgctttcattgtaactcttgcctcccttacttcagcagcgcgccggaaatgaccatcatctgcacttcgctggtgccctcgtagatctcggtgatcttggcatcacgcatcatgcgctcgatggggtagtcacgggtgtagccgtaaccaccgaacagctgcaggcaacggcgggtcacatcgcttgcggtgcgggccgcgatcagcttagcctgtgcagcctcgacgctgtaacgaacctttgcgccatccatagcctgctgcttcttcagagcggcagcataaaccagatacttagcagcctcaacacgagccttcatctcagccagctcgaactgggtgttctggaaagcggcgatggcacgaccgaactgcttgcgctccttgacgtaagcaatggtctcctccagagcgccctcggcaatgcccagagcctgagaagcgattccgatacggccaccgtccagcgtagccatagccagctggaagcccttgccgcgcacgcccagcatacgatccttcgggatgcggcaatcctcaaagatcagctcacaggtagaagaaccgcggatacccatcttgtcctctgccttaccaacagagaagcccgggtcggtgcgctccacgatgaaggcggagcagagcttggtgggacggccgcgcttatccagcacgttatcggtaacggcaatgacgatgaacacatcagcaaagccggcgttggtgatgaagatcttggagccgttcagcacccagtaatcgccatcttccttggcaatggtctgctgaccctgtgcatcggtaccagcgcccggctcggtcaggccgaaagcgcccagccactcgccgctgcacagcttcggcaggtacttagccttctgctcgggggtgccgttctcgtaaatgggagcagcgcacaggctggtgtgagcagagacgatgacaccggtggtgccgcagaccttgctcaactcctccacggccatgacgtaggacagcacatcgccgcctgcaccgccgacctcagtcgggaaatagatgcccatcatgcccagcttgcccatcttttcgacggtctccttggggaagtattcctctgcgtcaaccttctttgccagaggcttgacttcgttctcagcaaactcgcggtacattttctgcaccatctgctgctgcttggacagagtaaaatccatcgctatatcctcctaacaggtcttttttcatttaccggaatagcccggtgcaaacaaattcctcccgaccgctttccccgcagccgggagaaatgtttatcagaatttacagctggtcaacaggggtcttggtgcggtctgcgttgtaaacgtagaagcccttaccggtcttgcagcccagattgccgccgcgcaccatcttgcggatcagcgggcaggcacggtacttgctgtcgccggtctcgttgtacagcacgtccataatggccaggcagatatccagaccgatgaagtcgcccagctccaggggacccatggggtggttagcgcccagcttcatagcggtgtcgatgccagcgatatcggaaacgccctccatcttgatgaaggcagcctcgttgatcatggggatcaggatgcggttgaccacaaagccggcagcctcgttgacctgaacggggctcttgccgatggcaacggagatctccttgatcttctcaacggtctcggcgggagtgttgcagccggcgatgacctcgatcagcttcatacggtctgcggggttgaagaagtgcataccgatcaggggacgagacagacccttgccgatctcggtaatggacagagaagaagtgttggaagcgaagacgcactcgggcttgcagatcttatccagctcgccgaaggtggtctgcttgaccttcatatcctcgaaagcagcctcaacgaccagatcgcagtctgcgcacagatcttccttcaggcccggggtgatggcggcaacgattgcgtcggccttctcctgagtcatctttcccttagcgaccagcttctcgtagcccttcttgatctttgccagaccattctcggcccactcctgcttgatgtcgcacagagcaacagtgttgccctcaacctgtgcaaatgcctttgcgatgccctgacccatagtgccagcgccgataacaccgatcttcataggaaatctctcctttaatatcaaaaattatgtaatggattagttgttggtgaacactgccttgggcttcggtttctcacgggacaggaagcaggccatgccctcctgctggtcgtgggtctcgaagcaatcgccgaacagcttctcctcgacctcaacagccttctcgatgggcaggctgatgccgtcgttcattgccttcttgcagttgcgcacagcaatgggagcgttctttgcgatcttgccggccagcttcaggacattctccatcagctcagcctgcggatacacggcgttgaccagaccgatgcggtaagcctcgtcagccttgatgttcagagcagagtagaccagctgctttgccatgcccatgccaaccagacgagccagacgctgggtgccgccgaagcccggggtgatgcccagaccgacttccggctgaccgaacacagcgttgtcagagcagatgcggaaatcgcagctcatagccagctcgttgccgccgcccagtgcaaagccgttgacggctgcgatgacggggatggggaaatgctcgatcatcaggaacacatcattgcccagcttgccgaaggcctcgccttctgccttagtcatggtgctcatagaaccgatatcagcaccagcaacgaagctcttgtcgccttcgccggtcagaacgatgcagcggacagtctcctgatcgactgcctcaaaagcagccttcaggtcagccagaacctcggggttcagggcgttcagtgccttgggacggtcgatggtaatgatctcaacagcgccctgcacctcggtttttacaaatgccattgtgaaaacctccatttcatacagttcagttttttcaaaacagcccccggaacgcgggagagctctccggttccctccggcgctccgggtctgtggttcagtcaggattcagagaaagagtgcttagtccatctcaacgatggtagcgcagcccatgccgccgccgatgcacagggtagccagacccttgtgagcgccacggtgcttcatagcgtacagcagggtgaccagaatacgagcgccggaagcgccgaccgggtgacccagagcgattgcgccgccgttgacgttcagcttgtccttatcaaagcccagagcctcgccgacagcgatggactgtgctgcgaatgcctcgttggcctcgaccagatccatatcagcaacggtcatgccggtcttggccatgaccttcttggtagcagcgatggggcccagacccatgacctcgggctcaacgcctgccagagcaccggcgacccaggttgccagaggcttcacgcccagctccttagccttctcctcgctcatgacgaccagagcagcagcgccgtcgttgatggcggaagagttaccagcggtgacgatgccgtctttggtgaaggcgggcttcagctttgccagaacctcgggagcgctcagacgggggccctcatcggtatcgaacacggtgtcgcccttcttgcccttgatgacaacaggaacgatctcgtccttgaaggcgccgtccttgatggccttgtcagccttcagctggctgttgtatgagaactcgtccagcatctcgcgggtgatggggctgtagccgtacttcttctggtaggtctcgttggtgcaaacgttctcagcggtcatgcccatgtgcttgttgaagccgcaggcatcccacagtgcatcgttgaccatggtatccacgatctcgctcttgcccatgggagcgcccatgcggtagccatagcgagccttctgcagtgcgaagggagccatgtccatgttctccatgccgcctgcaacaacgatatcagcatcgcctgcctcgatcatctgagcagccatgttcacgcagttcagaccagagccgcagaccacgttgacggtgacggcgggggtctcgatgggcagaccagccttcagggcagcctgacgagcgacgttctggcccagaccagcctgaatgacgcagcccatgtaaacatgatcgacctgctcgggcttgacgtttgcacggttcagagcttccttgataacgatggagcccagctcaacagcgggaacgttggccagagtgccaccgaacttgccgatagcggtgcggcatgcagatgcgataacgatctttttcatgtgaatagcctcctgaattgtgtatgtgtgttacttatcggttacccatttatcaaaacgccctgcggcatttttgcggtatcagatttttccctctcccggagctgtgcgtatttttcgctgacggctttttccacattgggtgtgacgaacttgctgatgtcactgccgtagtacgccgcttcctttacgatggtggaggaaagataactccatttgatgctggtggcaaggaacatggtctcgatgccgggcatcagtgcgtggttggtctgcgcaagctgaatctcgttttcaaagtccgttaccgcccgcagcccccgcaccattacagatgcgtgacgcttttttgcgaattccacggtcaggccgtcgaagccttccacggtcacgttggggatgttcttgcagcattcctgcagcatggccacccgctcttccactgtgaacagcggatgtttggcgctgttgatcagcaccgccacaatgaggtggtcgttgatctttgctgcgcgtttgatgatatcaaggtgtcccttagtgaccgggtcgaacgacccgggataaactgctgttgccatcggtcagtgtcctccttgtgcgctgtaattactaagcgcgatgtggttctgccatgatagcactttccagccttgggtgcaacctgaaactgctgcggtgcgttttatcgttaaattttaaacgaatcatcccgcactgctccgcagttgcttcccacgctattagtaaagcacatcgtcaaaattttatcaagactttttctcaacttttttgttttttgcgtaccaaacaatccccacataaagataagaaaactgttcattatgctatactgactgttttttggccaaaactattgattctacactttgttaatgttataactaagttgagctgttctgcgcagagcggagtacacactgctgtcttgtttataaggttaccatacagatgtggcaaaacggtgtgcattccgcaaaacaggcttaaaacagctgcataatttgtccgcacagaattgtttacaattcttttatgtattttaagagaggatggtttataatggattgcaaggaactgtacgcacagaagcttatgactgctgcgcaggctgccgctctggtcaaaagcggcgactgggtggactacggctgggctgtgaacacccctgtggccgtggatgcagagttggcaaagcgtctgccggaactggaaggggtcaacttccggggcggcatcctgatgtgggtgccggagatcttccagatcgacgaccctgctgcccacatgacatggaacagctggcacatgggcggcattgagcgcaaggctattgcgcagggtttctccttctactcccccatccgctactctgagctgccccgctactaccgcgagagcagcgaccccgtggatgtggcagtatttcaggtgacccccatggacgagcacggctacttcaacttcggccccagcgcttcgcatctgggtgctgtgtgcgaaaaggccaagaagatcatcgtggaggtcaacaccaatatgccgcgctgccttggcggcatggagaactgcgtacacgtttctcaggtaagcggcattgtggagggcgcaaatccccccatcggccagatggcagctgccggtgccgctactgaggttgacctgaaggtagccaacctcatcgtgccgcagatccccaacggtgcctgcctgcagctgggcatcggcggtatgcccaacgccatcggcgggctgatcgcgcagagcgatctgaaggatctgggcgtgcacaccgagatgtatgtggatgcctttgtggatattgccaaggccggcaagatcaacggcagccgcaagcagctggacaagggccgtcaggtctacgcctttggtgccggcacccagaagatgtacgattacctgaacgataacccggagtgtatgtctgccccggtggactacaccaacgacatccgcagcatttccgcactggacaatttcatttccatcaacaatgccgtggatatcgacctgtttggtcaggtgaatgccgaaagcgccggtgtgaagcacatttccggcgcaggcggtcagctggacttcgtgctgggcgcatacctttccaagggcggcaagagctttatctgcctgtcctccaccttctttaataaaaagaccggccagctggaaagccgcatccgtcccacgctggagaatggcagcatcgttaccgacacccgcgccaacgtgcactatctgtgcaccgagtatggctgcgtgaacctgaagggcttgacctcttgggaaaaggccgaggctctgatcagcgtggcacacccggacttccgtgaggagctgatccgcgaggctgaaaagctgcacatctggcgcagaagcaacaaaatttaataagcgctgtgggtattcccgctgcccgcagcaggaatggagtttgtcatgatggacaaaaagccgcacatcaaaccgtatctctatgggatgctcgcagggtttggtgccattgcactgagcatcatcttctttttccttatttaccgctttgacggctttggctcggccatctctaccctgaccggcatcctgatgccctttatctacggtgccgtcattgcctacctgctcaagccggtgtgcaacagcatcgagagctttctgcgccggttcatcccggaaaagatgaacggtctgatcaacgcgctgtccgtggcgcttaccatcctgttcgggcttttgctggtgtatgcactggtcatgatgatcgtgccgcagctgatcaccagcgtgactaccctgtactacaccgcgcaggccaacattacaaagttcatgaactgggcaaaccatctggagtttattgaaaagaacgaacagatcacggagctgctcaattcagcctacgctgccctgaataccaatctggacacatggaacacatggctcaagaacaccctgctgccctccatgcagaacatcctgagcggcgcagccattggtgtgctgaacgtggtgacggtggccaaaaacctgatcatcggcatcatcgtggccgtgtatatgctggccagccgcaagcggttcgtgcagcagggcaagctggtgctgcacagcatcgtccgcccccgctgggcgcagctgatcaccgaggaagtgaagtacgcggacaaaatgttcggcggtttcatcaacggcaagatcatggactctgccatcatcggcgtgctgtgctatatcggctgtctgatcttcaagttccccagtgcgctgctggtatcggtgatcatcggtgtgaccaacgtgatccctttcttcggccccttcatcggtgccatccccgccaccctgctcatcctcatccagagccccatcaaggcgctgtggttcgtgttgttcgtgctggttttgcagcagctggacggcaacatcatcggacccaaaattctgggcaacaccaccggcctttccagcttctgggtactgttcgccatcctgctgtttggcggcctgtggggctttgtgggcatgatcgtgggtgtgccgctgtttgccgtcatctatgatgtcatcaaaaagctggtcatccacggcttgcagcgcaatcaggagctgaccctgctgaacagctatcacgaccagttcggcgaccccacagacgatgcagccgcacagcccgctgcaccgcaacctgccgaaaaccagtaaacctttccctgcaccgcatcagagcccttccgatgcggggcatttttaatcatattacaaattataaatcgaaagt

SEQ ID NO: 13838 - DNA, 11709 bp, Unknown
  gut microbiota DNA sequence
gtgaaagaacttcccttggaaactgaaacaactgttgaatgcgtgctcttgatgtcaaaagtccagtaatatagtgcggtgattcgtttaatatcgtttggacatcatttcacagtctgagccgttcttgtccttggaaacaggtcgagggcggttttcgagaatttgagcaatatctaaatcgtagccacaggggtagtggataattgagtttctggattagatgtttgggctaacagcgaatccactaactcaggtatctgggggtatccagtgtaggatttagatgtcatccccctataacgcaaaaacgccgccagcgtagcatgtgaaatcatcacacggtacgctggcggctatgcttttattgtttatacagctttcggcgtgagccacttttctgaggaagacgtccgttgcgtttcacataaagaaacatctggctaacaaaaaagaataaagctgatttttatgccctcattattctctataaatagcactgcaccgcagctcttgacgtttctcatccagagaataccggatcgtaatcacaccattttctgtctctacttctacctgttttgcatgttcaaacaacctgcgcaggcggcggtactcgtcccgctgcgcatccgtgtagtgagacggcatatccgaggtaaggaacacattgcccagcagtgcgttgactgtggcaagggtgcgtttttgctctgccgtcagcttgcagttttcctcccggaggaagaacacatccgggtcgctgccataggcacggccattgagctgccgccggaacactgtgttgttcagcgcctgctttgtggacacccgctcccggtggaacaggcgcatataccacacatcgtcccagtccagccctacgtcacagctgacacggcagtagtccaccagcccgaaggcaggcatcaccggcacgccgcagccgaggatggctttttgtccgcaccaactacgcagcagctccatggcacggcgcatccgggcggcacgactctcgcgagcattgccaaagggagcagcgccgtacagaaaatccagcttgacaaggtcgaaaccccaatcgttcagcacccggtcaaatacccggcgcagatagtccaacacggccgggttgtcgatatccagtgcataaaagctgctccagttgctgccgcagcaccacggtttgccgtccactttcagcagccagtccgggtgctgccggaaaagggcagagtccttttcgcacacaaagggcgcaagccagagcccggcctgaaagccagaggcgtggatctcctccaccatgcctttcagcccgtgggggaacttctgtgcatccgtttccagccagtcgcccaccttcggctcccagccgtcgtcgatctgaaacaggtctcccgggcaaagcaggctgcggcatccggtcaggtcctcccggatggtgtcctcggtgatgtcctgatagcggttgtaccagctggaatagccagccagcttctcttcagttcgaggacggatgcccatagcccgaaaccaaccgtcaaacacttcggtctcgccgccctcggcaaaaaacaggtcgaacagagcaaagctgccgccgggatgctccaccccggcgcagtcccgctccagcgtcagcagggctttgccgctgtcgtaccggaggatggtgtagcccggggtttcgtccagcgatgccaccagctgaaactgcccgcccttgcggaaatagcagtaggaaaagccgtggctctgaccgttatgatgcccgtaaggtacaaagtgataatcgccgtagcggtcaaaggcgtatttcttgcgcagaaagccggggatacggtcggtgccgcgcagcttgccattccggtttagctccgggctgtatgtccatgtctggtagccgttcatgaacaggcgctcgtctgcttccatcttccacggcagctcggcacgcacggctttcagcgtcccggcaggcaggtcagcggaaagatgcagcgcaccgcagcccgggtgcaccggggcatcgccctgccgtacaccgcctgtggtctctgcgtaccagtgcagcgtttcagtcatggtgcgtttcctccccgtggagctgtgcgctgatctcggcagcgcgggcatccgtcaaaacgaacttgcggcggaacagcaccagcgcacctgccagcaccaacatgggcaggaccgtcatcatcaggcgcagacccagcagcgttccggcgctctgtactgctacggggccggtctcctccgtgttgcccacaagaccgatgaggtccagcccgatgccggtcaggaacaccgccacgccggaggcagccttgaccacaaaggtctgcatggaaaagatgacgctctcctcccggcgtccggtcttgagctggccgtaatccacactgttggaaaggaacagggtggtcagcacggtcagcatcccgttgcaggcgaacacgacaacgcccgggatgcacagcagggcaaggctatgggaaagcccggtcaggcagaacaccagcagcgtgccgtagccgcacagtgccagcacaaggctcaggtgaaatacctgcgtgctgctgaattttttgcgtagcagcgggtaaagcaccatcataccaaggatctgcgccgcaccgcccacggtggaaaacagggtgtaggtggctttccaacctgcaccaccaaggtcgtatttgaagaaatagatgatgaagttggaggtaaggtacagcgccgagttgatcagcacgatgctgcccaccactaccatagcctgatcgttgcggaacagggcggagaacatctcttttacggtggcggtcttcatctcactgggggtggtttctttcatggaaatgcagcacaccagctctgtcactgcaaaaattgccgctacgatcaatgccacccagcggaagccagcgcgctcgctgtcgccgccaagggctccaaccagcagcatggtgaacatggcgataagtgccgaaccaacgcccgcacaggtacgccccaccatggaaagattctcccggtctttgggcgtgcgggtcacggcggggatcatggaccagtaaggaatatccatcatggtataggtgacgccccacaggatgtacaccacgctgaaatagaccatcagcgctgcttcgtccagcaccggggcggcaaacaaggcgtagagtaccagcgcattgagcagcgtaccggaaaagatccacggacggaaacgtccccatcgagtgcgggtctttgccaccagaacccccataaaggggtcgttgaaggcatcgaagaaccgggctgccatgagcaccagtcccacaaagcttgccgaaagtcccagcacatcctgataataatacatgacataagaagccgacagggcatataccatatccttgcccacggcaccaatgccgaacgcggttttctgtttcagggtcagttccatacagcatcctccttttcaatggtgaaccgcagcacaacgggctgggtctgcggggcagaaacggtcaacagggcttctccggcggtgcccacggtgcgcagataggtgccggtcatgccgccttctgccacggcggtctgcgggcccacaagggcggcgctgccctccaccgtaaactgcaccgggaactgtgcgtagggggctggggtgccattttcgtccagaatccgcacccgcacagccgccatatcgtaggtgtcctgctcccgcagggtcgtccggctgactttgacttccaagtgcagctttgcactggggcagagggtcacgctgcgcaccacgttgccgtcctgtacggcatcgaacctccatcgggtagcttcgccgccccagttgcccacatatttgccgtaaagcgccacgccatccttaaaggccattttatagcgcagcatacaccagccgaatttgaccttgtaggccagcggcagtcccgctaagccatatttcccggcagccagcaggcagtcccgcacagcggctgccttggagggagaaaagtgttcctgcgtttccagcagctcgccgatggtatcgtccatcacaaagggcgggtggggcagcgccgtccactcgctgcggcgcagggcggtgacgaacacatcgtttttgtaaagctttacttgctgggcattgctgaaaacataggctgtgcccagctgcccggcggggttatctccgatgtccatggaggagctgactgccagcaccgggtcagtatcgccctgactggcatagaccgcagccgccagcttcgggttgcggaagctgtccagcacaccgtggtagcagatgcggtccccggagccaaagtccttgtgagtctggtaatcgaacatgcaccagccgaagcacccggcgtgctccccgctggcataggcggcattctgcacccggacgtgccgcaaggcgtgctcctgccgatgcggaccatcgtcaaagggcttggtggggtacatgtggccgttgcactccgaaatgagcagcgccttgcccatatccggggtcacgtcctttttaggcttagcaccgggcgttgtgccgttgtgggaaaaatcgttgtaggcgtaaacatcctccagcagatggcttttttccagatagcgcacgccggaggtagcacggctggggtccagctgatgggcgattttgttggtgcgggcatagaaggcatcgtcgtccacgctctcgttgatgcgcacaccccacaggatgatgctggggtgattgcggttctgcaagagcatctcctgcagcatctcgcaggcggcgtccttccagttgtcgtccccgatgtgctgccagcccggcaattcagtgaacaccagcagaccccgccggtcgcactcgtccagaaaatactggctttgggggtagtggctggtgcgcacggcggtgcaatgcagctcctcctgcaaaatgcgggcatcctcccgctgcaggctttccggtgcggcgtaaccgatgtaagggtagctctggtgtcggttcagaccccgcagaaaggtctttttgccgttgaggtaaaaaccatccgcccggaactctgcggtgcggaagccaaacgtcacctgtttgcggtcgatgggctgccccgctgcgttcaaaagctctgccacggcatgatgcagcaccgggtgctctgtatcccacggctgtgcttccggcacagaaagctgcatcttcccggtttctgccgcaggtgcagtctgctctgccagcaaagtgccctcagtggtctccagccggatgcggaccgccgcggctgcgggcgtaagctctgctgtccactgcaccacagcctcctgcagggtgggcgtgtagacgaacagatcagtcagacggctttctgccgtagcttccagccagacctcccggtacaacccgccgtaggtcaggtaatcaatgacaaaaccaaagggtggaatcgttgggtcttcacgggtgtccagctgcacggtcagcaggttttcaccctcccggtccacaaggtcggtgatctccaccgcaaagccggtatagccaccccggtgctgcccggcaaccctgccgttgacccgcaccaccgcctgatgggcagcgccgtcaaagcggacaaacagtcggggcgcagcctgcaccggcggcactcggaaccgcttccggtagccgcagaccatctcgtaatcagcgggggtggcatagtgcagcggcacctcccggcaggtatggggcaagcggacggcttgttgttttggcaccggcagccccttgccaaaggcctctgtccagtgtcgtgtgaactcccagtcctcacaaaaactgtgtttcatcgcggcagcactccttccagtaaaatcgagatcatttcctccagtacagccacatactgcaccccgctttctgccagactacggtctgccagaaaactctcgatggatgcggtgatcatctgccgcagcaccggcagggataccggacgcatgaccccctcagccacagcctgctccagcagcgccatggtgggctcccacccgttttccaactgactgcgcacccgcgccgccaccaccgggtatttttcatccagctccttcatctgccgcagatccagcgcggcatattctgccggcatggcaatgatgactgcccgcagcttttcctgcaaagtaccaccgcccgccagaatttcctgcttgcagcggtggatctctgcaaaggcgtggtctaccatatccagtaaaagcgcctccttggaggggtaaacggtgtagatggtctttttgctgatgtgcagcggctctgccacctgctgcatggtgaaatgcagcccctgttggcggaatagctgcatcgcctgcgtgcgcaccagcgcatcgagcttttcctgcatgagcgtcctccttgtggaaactgtatttgcatttctggtttccattctagtacggaaaccaagttaaatcaagtagtttccgcattttctgcgttctgacgaagaacccgagaagaatcacagcagaatgccatatctcaaaacgcagcagccggaatggtatccgtaaacataatcttggcgagaccaacgattcccgttttgcccacgctctgcacaagggactgtatttcgactacatgatggcaaacccgcctgtctgattttcaggcgggcattttactttgccaggattttgagaactacaataaactgcccccgaaacagcacggtctagcgcgctgcttcgggggcagtctgttgtttattcaattataaagttactgctttgcactttccggggcgacctcaaagtcgatcttgcccagattgacgtccgcacgcacaatggtgatcatcatggtatcgcccagattccagttcttgccggaaacgggatcagaaaggcgcacgccctcggtaagcatggtgccggtggcggtcaggctggaagcaggtacaaagccttccacgccgttttccaactcgatgaacaggccgcgctgggtcacgccggagatgcggccctcgtagcactcgcccagatggcggcgtgcatactcggccttatagcagtcctcggccttgcgctcgatctgcatggcgatgacttcgcgctcgctggcctgcttgctgacgtcctcggcaaactcgctgtaacgcaggatcatggtgtccttatcggtacccttgagctgagccgtcatgatgcggtggatagccaagtccgggtaacggcggatggggctggtgaagtgggcatagtcctgcagcaccagaccgtagtgtcccttgggcttttcctcgtacacagccttggacatgcagcgcagcataccggtgttgatgatctgctcataggcagtgccgcgcacgccctccagaatggcgctcagctccttgggggtgggcacatccttggcaaagtggtcgttgacgccgcaggcctgcagcaacccgtgcaagcgctccagcttttcggcgttgggctcctcgtgcacgcggtacacaaagggaatctgcttcacccgggcaaagtgggcggcgcactggtttgccagcagcatgaactcctcgatcatggcctcgctctcgccggaggtgcgctttttcacgtcgatgcagtggccatcttcgtccaggatcagcttcacctcgccgctctcgatatccatgcagccgcgctccttgcgcaggcgggcacggtggccatacagctccttcatagcaggcagctgcgccagtacttcatggtacttgccggtcagttcgtcatcggtgctgccggccagcagggcgttgatctcggagtacacgcccttgacccggctgcggatgacggacttgacaaagcggtagtcggtcagattgccgtccttatccagccgcatcaggcaggagaaagccagccgcagcacgccctcgttcaggctgcagatgccgttggacagctgcttgggcagcatgggcaccacctgatcggcgtagtagacgctggtagcgcggttaaaggcctcgttgtccagctcggagccgggcttgacgtagttggaaacatccgcaatgtgcacgcccagctcaaagccgccgtccggagtcttggtcaggctgatggcatcgtcgatgtccttggtctcggcgctgtcgatggtaaaaatgggcagggcgcgcagatccatgcggccctcgcagtccgcagcagacacctcggcgttgtccagctttttggcctcgtcccgcaccttgtccgggaagcggttgcggatatcctgcgcgtagagcagtgcctttgcgcagcgcttggcctcgtcgcagctgccaaagcgcatggccacgcccacgcggtgatcttcctgacggctgccgcgcagcagaatctccactgcaaccttgtcgccgtccttggcgctgccttcgcagtcccgcatgacctgcatggagatggcggggcaatcgtccggcacaaacttcaggcggccctccatgcggtgcatggtgcccaccagagaatttttctcttccagaacagcaaggatctcgccctcatcgctgccctctacccgggggtgcgcaaacttttccaccagcaccttgtcgccgggcattgcgccgcgggtgaaccggccggggataaagatatcgctggtgccgtcctccagcatgacaaaggcaaagtttttgcccagctttaccaccttgcacagcagcgccttatcggcacggccgctgcgcacggtgaagaacacgccttggcgctggcagatgacagcctcgtgcaccagctgatccacagcctccatcaccttgcggtctgcgccgcgatccccgccgaacttattcttcagatcttttacggtgcacggctgattctggatcgcgtgctcaattttatcgcgcattgccataaaatattttctccttcacttccgtggccgtgcatctcctgcggagcacagccctgccttgggacgggcacttttccctgtcccctctttgcggcagcccgcaaaaccggctgcccgcactttttctgcacagaaaaacagccccgtccgttcacggggctgcaacgccttctcagcctgccagacggcctgcaaacaggcaagccagaatagcaaccacaaagaacaccacgcctgcaatgcgggtgaccttagccagcatctggtctgccggggtcagacgtgcattgttggcaccgcccacactgccgttgatggcaccggacaggccctgaccgtgggtgtgctgcatgagggtgaggaaaacgatgaccagcgaagccaccagcagaatggcaccgccaacaatttcgataacagacatgaatcgtaacgctccttttatttgtaaatacggaaaactacgcaaaaatacaactatatagtagcataacaaagccaaaattgcaagtagaatccgcgcatttaacccgctgcttccagcgcgttgcagacctgcgcaaagatggctgcaccggagtacgccgtgtgcaccgcaccgtcctgcaataccacaatggtatagcggggcttttctgccggccagaaccccgcaaaccacaggttgcagcgctcggtgccctccggggtgaactgcccggtctgggcggtaccggtcttgccgcccgccccaccggaaagcccggcggcatcctgtgcggtgccctgctgcaccacctgtaccagcatagcgcgcaaaagcgctgcgttctgtgctgagatcacccgccgtccccgggggtggctgagggtctccaccggttggccggtggcctcgtccagcgtggcttgcagcacatagggggcgcggtatacgccgtccgccgcaagggtgttgaacagtgccgccacctgcatgggtgtcgccagcaggctgccctgcccaaagctgaaattagccagctgcccgctttgcgccagctcctgcggggtgggcagctgcccggcctcggcggcaaacccctctgccagcagcaggctctgcccaaagccaaaggctttagcggcgtccagcaagctttccgcacccagctgctgtcccagacggataaaatagccgttacagcttttttccagcgcggcggcaaggtccacctgtccatgcggcaccccgcccgcgcagcggaagatctgcccatccactaccaccgcgccggtgcactcgaaaaccggctgcaagcccgcttccagtgcagtcgccgccagcaccggcttgaacaccgagcccaccgcgtagctttgcagtgcccggttcagaaagggactattctctgcctgcaggctgtcggcaaggtgctccgggtcgtagcacggcacactgacgctggcgcgcaccgccgctgtggcggtatccagcaccagaatgcagccgctcgtcatggtacttgccgccactgcttccactgcccgctgcaccgggcgggagatggtcagctgcacgcccagcgccccgctgtcggcttgcaaaagcctagccgtttctccggtgcgcagcgtaccctgcgccgtcacggcgcagacaagactactgttctcccctgtgccggaaagcacggcgtccagcgccttttccagcccggcagcgccatgacccgtgctatccagatagcccagcaaatgctgacacagcggcaccgccgcataccgccgggcggtaggataaccggtcagcccaaggcgggcggggtcgcagcttacctccagtaaaaacggcgcagcacggctgcggctgcggtacaaaagcgcctgcccggcggcatcggtgcaggcatacaggcggtcgtagtttccctgcccgggaaagcataccacctgccagcgctcctcaaggccggtgagcagccgcccctgcgcatcgtaaaagttgccccgtcgggcgggcaactgcagggtgaccgtgctctgcgccgcagcccgcgcagcataggcggggtgcagcgccagcagatacaaccggcacagcaccaccgcaaatcccagcagcaaggcggcatacaccgccaatacccgtttgccagacatccccgcgccccctttccctgtggttagggtgggcagccggggcgcggggtatacataaaaagaggcggaacctctccgaagaaaagttccgcctctttggcgtttctttttaagaaagactggtacggcttagtacatgccgcccttccaaaccacacttttggagccgtatcacgaatatcgagaaacgtagacttttgtagaattatcaaggccacaagccgatttttccagattctccgtttttgcacgatccacgcttttctacgcaaatctacgccacttaccgggtgattggcgtaagttttggcgtaagtttcggcgtaagcaattccgcttcatgcgtcgaaaatcacaggttgccggcgatctgttcaaaggctctttcaaccgattcaaagctgctgtgcgtgtagacatccaacgtcacactggcattggagtgtcccatcaggtattgcaggctttttacatccagcccggcttgctgaacattggtgcagaaggtgtgtcgcagcacatgaggtgtaacgcgcggaacaggtttgccgtacgccttctcaaactttccctgcacgccacgcatatagttttccaagtgcattgccaccttcggcattccggacttgtccagaaagagaaatccgctgcagccatccaccagtgcttctacctttgtggat

SEQ ID NO: 13839 - DNA, 18095 bp, Unknown
  gut microbiota DNA sequence
actgttttatgggaactctgccaaaagcagctctccgctttcccagcagctgctccttgatctccttggagatgaccgcctgaaaatcgtgcacgatggtggggagcagttccctgcaccctcaaaggactttctctgttgtcattctgcctgtatctcttccaccagcggcagatagtcggcacagtatttccggtacagcggctgtaccagctggcggaagttctgcatttcctctttgggcagcggcagttcccggcacccgccagccaatgccgcttctcgggcggcagtttcttcctgtgcccagagttggcgctcgtattgcgccgatgcccgggcgcatttctgcagaatctgctggtattcctccggcagtgcatcccatgtgcggccggaagccagctgcacctccggtacgcggctgtgctcatcggccatgtagtaccgcgccaccttgtagtgctccatggaatagtaggccggccagttgttttcggcggcatcgatctgcccggtctcaaacgccgagtacacgtcgctgtaagccgtggtctccggcactgcacccagcaggcggatcatgtcgatcacgatctgcgaatcctgcacgcggatggtcttgccctgcagatcgttcaggctgcgcaccggctgacgggcatagaacgagcgggcacccgcgtcgtaccagctcagccccacccgcccctgcgcggtaaagtcctgcaaaaactcagccccgatgctgccatccagcacacgccacatgtggtcggcatcccggtagagatacggcagcagcagcacgttgagccggggcagatcgtccgtggccgccgaaagcgacacacgcgcaaaatctacgccgccaatggcaagctgctcccacacctgctgctctgagccgtactcgccgttcgctttgacctgaatgaccaccttgcccccggtctgctgctgcacaaggtctgcaaaatactgcgcgccctgtgtagtggggtacccggcgggctggttgtcggcataggtcagcacatagtccggtgtagtctgcggctttgcgccacagcctgccagctgcaaggctgcaaagcccagcccggctaaaaaggtccgtctgcgcatggtctctccctccctttgcagatagtatagcgcacaagactgcctttgtgcaagagacaagaaaaggcggtgcccgctgcaaagcaggtaccgcctttttaggagaagaagggaatgtctcagttacatcaggcccattgcctgcggcagtgcggtagacactgccgggataaaggtgaccagcagcaggccgccgatgatggccacatagtacataagcatgtacggcatgaccttggaaagcgaggtgcgccccaccttgatacccacgaacagggcgttgcccacaggcggggtgatgttgccgatgcaaaggttatacacgaggatcagaccgaactggatggtgctcatgccaaagctctggcagatgggcagaaacagcggggtgaagatgaggatggccggggtcacatccatgaaggtgccggacaccagcaggatcacgttcatgatgagcaggatgatgtacttattgctggtcaggctcagcagggctgccgccacggcatccgggatctgcaaaaaggccatgacccagcccagaatgttggaaacacccacaaggaacaccaccatgccggacatcttggcagagtccacgatgatcttccacaggctcttcaggttgatggagcggtagcagaaagccagcaccagcgcatagacgaccgcgatagcagagccttcggtggcagagaacacaccgccgatgatgccgccgatgaccacgatgatcaaggacagagaaggcagggcgcgcagggtgcagacgccgaggtttttccagtcaaatttgccgggggtgcctttatagcccagcttgaccgccagcagcacgcccaccacgcagcagcacagtgcccagatgatgccggggatgtaaccagccatgaacagcgcagccacagaggtaccgccggatgccagcgagtaggtgatcagggcgttggacggcgggatcagcaggccggagcaggaggaagcggcgttggtggcagcggtcacggcggggtcgtagccctgctcgtcggcaccgtcgcggatcatggagccaacagcagcagccgcagcggatgcagagccggagatggcaccgaacagggcgttggtgccgatgttggtcaccagcagtgcgccgggcagcttgcccagaatggccatgacgaaatccaccagacgcttggcgatgccgccctgattcatgatattgccggccagaataaagaacgggatggcggtcaggctgaacttgctcatgcccacaaaggtgcgctgggcagcggtcagcacggctacattcagatcaatggaagaaaggatggcagtcagggaagagactgcaatggcgtacgagataggcacgccgaggaacagcagcaccagcagcactgccagaattacgagtaacgcttgaattgccacagcttagtcctccttgttttccttgtcggcatcggcagccatttcggcttccacctttgcaaagtctgcatcttccggggtatccagacagatggagccgttggcgatgccgataatgttcagcacggaatacaccagaatgatcacgccgcagatgggcatgacccagtagaacacgcccacggcaacgcccagcgaggaggtctgctgtcccatagccagctgggacacctgaaaaccgccgaacaccagaatggtcgcggagaagagaaaggcgatgacctcggcaaagatgtggaacgccttgcgcatgatggggttgaatcggtccaccagcacggggatgttcatgtggccgcgctcgccggagacgatggtggcgcccagcatggtgctccagccgaacagataacccaccagctcttccgaccatgtggagggagagttgaagatgtaacgcacgatgacctgataggtggtcagtaccaccatgactgtcatgctcagacctgccagcaggttgagcaccttgttcagggtatttctcagtttttccatgatgctcctcctcagtccgcagtgtgggcagcgttgtgctgctggatcaggtcataaatgggctgcaagtccgggtttgctgccagcacggaatcgtgcaggggggccatagcctcctgaaacggtgcagtgtccgggtaaataaagttgacgtgctgctcattctcggccttatctttcgcctcagccacagcatcctcccaagcatcctgctcggtgcgcttcacgatctggaaaccttcttcaaagatcgcgcgctcctcgtcgctgagtccgttcaggaaggcgtagtttgccaccagcaggtccggcaccatctggtgcatatcataggagtaatacttgcagatatcgccgtgaccgttatcggtcagagccagctcgttgttctcggcaccatccagaataccggcctgcaatgcggtgtacacatcgccgaagcccatgggcgtagcggtgccgcccaacagacgcatcatttccacattggtgggcgactgctgtacgcggatcttcagacccttcaggtcggagggctggttgatgggggtcttgatggtgtagaagttgcgggtaccggcatccaaccatgccaccgtttccagaccggctttagaagtcgtcttgaaaatggggtctgtcacctcggggtcatccatggcctcgtggtaggcttccacgctggagaacaggtaaggcaggttgaagatctggtatttggcgctgaaggtctccataatggcattggacgccaccacaaagtcgatggcaccggtctgggtcagctgcaccatttcggtctgggagcccagcagctcgctggggtacacctccacgcggtacttgtcgcccagcttctcgttgatgtagttggcaaaggcttccagtcccagatgatccgggtgggtctgggactgcacatggccgatgcgcacgatcttgcggtcgtcatcggagccggcgccgcagccggtaagcatcatgctgctggtcagtgccgctgcgcccatcagcgacagaaacgttcttctcttcatgaatggcatcctctcttttcgcgtttttctatgattatagtttaacaaaccgttcatttttgcgaaaccggattattttgtgaaacgcagtacgattttgtctttgttgtatccaagtacaatttttgtgttttgcgggcgaaagaaactggcaaaaataaagaagcgcccgtccctctcctgctgacaggcagaaaagaacgagcgcttcttttggatccgagttatccctgtaccgctttttccgctgcggctacgcggtattccgaaggggtctggccggtcaggcgcttgaacacccttgtaaaatagttggcgtcgctgtaacccacagcagcgccgatatctttcaggctcaggcgcgggtccaaaatcagctggcgcgccttgttcacccgatattcgttcaggtaggccgaaaagttcaccttaaagcactgcttgaacagcttgcagaagtaagcgtccgagtagcgcagcgcagcggcggcatcctgcatggaaatatcctccccatagtgagcgtcgatgaagcggctgatctcggcccggatgatggcggtgcgcatatcctcgtcctcttcccggcggaggggctctgcaggcgcagggggctgtgccgggcgggcgggcaactgcaccgacacctgccggatggcatcttccaccgtgaataccaactcctgctcattgtagggtttgagcagatagtccatcgcccgcacagagatcgcctgccgcgcatagtcgaacttatcaaagccggtcaggaacaggatggcgcaatttttgtccgtttcgcggatcttacgcgccacctccagcccggtgagacccggcatttcaatgtccagcacagccacctgcggcgcttcgcgggaaaaaatttccagcgcttccctgccgtttttggcttcatacagacttatcagatctcccagatacttctgcaaagtcctgcacagcaccttgcgctcgatcaattcatcctctgccaccagcaatttgcacttcacgagagcgtctcctccttttcttccggctgctgcgtttgcggcagttcaaaccgcaccacagtgccatgacctgcgcggctgtacacctgcattttaccgcccggatacagcatcccgatgcggcgagaaatgttgccaaggccgatgctgcggccggtctgctcgctctgggcaattttggtttgcacggcgtccaactcctctggggtcatccccttgccgttgtccgcgaccgtgagcaccagcaccttgccctgcatccatgcccgcagcaggatgcgtccgccttcctcgcgggacttgagcccgtgcgagtaagcgttttccaccaccggctgcagcataaaggacggtaccaaaaccgccgcaggctgcacctgaatgcttttttctacggtaatgcgtccatcaaaccgcatctgctgcagataaatgtagtcctccagcccgtccagttcctcttccagcgtgatctgctggcgcttggtgcgcaggttgtgccggaacaaactgcccagatgcacgatcatctggtcggtggtggaagcatcttccagccgcgccatgcaggagatcatgttcagggtgttgaacaaaaaatgcgggtttacctgacttttaagcacctccagccgggtgtgttccagatccttttccagcgcaaggttccgcacttcttcccggtgcaaggcctgctgcgtggtcagctgctgcgccatggcgtgtttcatctggttgaaggtggccgtcagccgccccacctcgtcgctgcttttcaccggaagatccgggctggaaaaatctccctcggcaatgctgtgagaagcctgcgccaaccgcagcagcggacgcaccaccgcgcggctcagcacccggatgagcagcagcatcagcacagccgccgtcaggaacagccccagatacagccacggcagatgccggatgtgagccgccgtgctgctgtaaagggcgttttcctgttccagcgtggcctgtgtcaggcgcagcgcatactcggcaaggtagtcttgcagcgccatcacatggtacatctgttcaatataggtatctgctgagggcgaaagctgcaaaaaggcatcccgctcctgccggtaacccgcgtacccctgcaaaaggttccatgtgcgggcatagcgttcttcgccgatacgggcgtaatcgaagggcagggccgcaaggctttgctcggaagcggtgcaggcggcggtataggcttgttcggtttcagaagtaggctggcgcacatagcgcgcaaaggcctgtgcttcgtccttgagggcgttctgcaccgtgtagcagacggcgttgtcggccagcagcgtatcaaaggagtgcaccgtccattgacctgccatggtagcaatgccggtggaaagcattgtgaccagcaaaatcgcggcaagccatgccgtgaccctgctgcgcagggaaataccgtcctgcgtggttttgttccgtgccatacgctttccctcctgcccttgcagcacccggtcttttttataagataagtataataatctcccgggaaaagtgcaactgcaaaaaaagcaccggtttccgcaaagaagccggtgcttgcaggcaatgtgccaagcggtcaacgggtcaaaagctcaaagtggttccgcttggtgaccagcagcccttctttttgcagcttggaaagctccaccgacatggcggcacgctccacgcagagaaaatccgccagctgctgacggtcaaaggggatgtcaaaggaaagggaggactgccggatggattcggcggacaggtaggacagcagcttttcccgggtggtccgcttgctgacatgggtgatcttatcgttaaaaagcagtattttgtttgccagaacgctgaccagattgcggatgagtttctggtgatggtcgcaggcggtggggcaggaggtgagcagccgcttgacgttcagcagcaggatctcgcaatcctcctctgccaccacgctgatgttcaggatggcaccgggggtggcggcgtaaggctccccgaaaaagtccccggtattgcacttggacaggatattgcggtgtccccaaagatcctcctgtatcacaagggtggagccggacaacatgagccccatgacctccgtggaatctccggcacggaaaatgtaggaaccccggggccgggtgattttcgctgcactgacacagtgcaggatggacaaaatctcatcgtcagtaagcccggtgaagaaggggcagctccgcagaacaggcagatatttttgcataaaggctctccttgttggaattcaaacatacaagatggctttagtatactataataaacctgcaaatgcaaaaaacacccacaacaggagagtatagatatgattcggaagatcatccatattgacgaagaaaaatgcaacggctgcggcttgtgcgcaaccgcctgccacgagggagccattgatatcatcaacggcaaagcaaagctggtgcgggaaaatttctgcgatggctttggcgactgcctgccgggctgccccaccggagctatcacttttgaggagcgggaagcccctgcctacgacgaggcagcggtgcaggagaacaaaaagaaaaaggaattgcaggagaagatgaagcacctccacgagggcggctgccccggctcccggatgcggatgctggaacagccggaggctgccgaaagtgcagttgccgcccctgtgcagccggtctcccgcctgcgcaactggccggtgcagatcaagctggcacccatccatgcgccctactttgagggtgcaaagctcctgattgcagcggactgcacggcctatgcctacgccaatttccatcaggagtttatgcgcggcaaggtgacccttatcggctgcccgaagctggatgctgtggattacagcgaaaagctgaccgagatcctgcgcagcaacgatatccagagcgtgaccatcctccgcatggaggtgccctgctgcggcggcttggagatggcggcgaaaaaggcgcttcagaccagcggaaagttcattccgtggcaggtggtcaccatctccattgacggaaaaattctggattaaaagcacaggacagacctataccgccttttaatgcttcacgcatttcttgccttgcggtaaaataccatagattccataagcgggcgacctgaaaaaggctgctcgcttttttatcgtcatcgcagtatttttgcgggaacggctttttgccggtaagggataaaagcgttccatagaaaataggtgctctttacaagaaaaaatcttgaaacgcttctgttataatgttacaattatgctacataataggatagatattcaaaaaagctgctgacagcagaacgagaatgatattgcaagcaccttcctgaaatcggtgaagtgaaaataaagccggaatgagaccgtctggggtggagaaagattggataaaatgaaaaactctggaatgagcgaaaccatgcagaccttgacacggaaaagcgcctgtgtgatgctgagcctactgttgctactgtcagccgtgctccctgtgaaagctgccgcggaaaccgcctctgcaaaggttgttcgtgtcggctcgtttgaggacaccttcaactatgtcaacgagaagggcgcaagaaagggctacggctacgaattgctggagaccttgtccggctatacaggctggcagttcgagtatgtgacctgcgactggtcagactgcttcgaaaagctcaaaaacggcgagatcgacattattggcggtatctcttatacggaggaccgcacccaggagatgctgttttcagacgagccgatgggagtggaaaaatattacctctacgccgatctctcgcgcgcagacatctccgcctccgacttcaagacgctgaacggccaaaagatcggcgttctgatgggaacggagccggaagtgatgctgaccgagtgggaagaaaaatacgtcctggaaacggaacacgtcaacatctccaacaacgaggatgtgaagcaaaagctggcaaaccacgagatcgactgctttgtttcgctggaagaatccttctgggcagagcgtggcatctcgaccataacccgtgtgggagaatccggcatctactatgcgatcaacaaaaaccgccctgatatcaaagaagaactggacgatgcgatgcgcgcattgaacgaagctgcgcctttttatacggcggatctgtacaaaagatatttctcaatggattatacgcccatccttacaggggaggaaaaggcgtggctcagaaagcacggtgcgatcaggatgggctttctggcgagcgacagcggcgtcagcacctatgaccctgccaccggggagtttaccggggtaatcacggactatattcagtttgcagcagattgtctgggcaatcaggaactggaattccagctggtcggctatgacagcaaggaagcagaactggatgcgctgaaatcgggcgagatcgacatgatcttccattgcgaccagaaccccaatctggcggaagagtatcactttgcctgtaccaacacaacgtggacctccaacctgatggcggtcacgaacaaacagcactttaacgaaaacaatgtaaaccgcattgccgttccccaaaacaaactctccctaaaaaagtaccttgcgttttattacccgcagtgggagatcatggactgcgatacacaggaggatgcggcaaggctggtcaaagacggacaggcagattgctttgttaccgggatcagcagtgagaataaatacagcaagaaatacagcttttacagcgttccgctggtaaaccctgtaagatcctgctttgcggtcaatagcggaaaccgcagcctgttgtccatcctgaacaaaacgatcaaggcaatgcctgttaatatgcttgccggcgcgcttgcgatgtataagagctccgcgcggaaggttaccctgagcgattttataaaggataacttctttaaagttatgttgatcagcagcattgctgttgcagttgttctgctcacgattttgatgctgctccagaaggcgcgtaaagccgaagctgctgcaaggaaagccgcaagcgatacgcaggaactgaatgcaaaattgcaggtcgccgtggaaaaagcagagaccgcgaaccgcgccaagagcaccttcctttccaatatgtcccacgatatccgcacccccatgaacgccatcatcggctttaccacgctggcgctcagcaatattgacgatacagaccgggtgaaggattatcttggcaagacccttgcatccagcaaccatctgctctccctcatcaacgatgtgctggatatgagccgcattgaaagcggaaagatccatctggaagaggtggaagtcaacctttcggatgtgctgcacgatttaaaaaccatcgtcagcgggcagatttatgcaaaacagctggagctttacatggacgttatggacgtgaccgacgaggacgtctactgcgacaagacccggctgaaccagatcttgctgaacctgctgtccaacgccatcaagtttaccccggcgggcggcacggtctcggtgcgggtgcggcagcttgccggtaaggtgcatggctgcgggcagtacgagttccgcatcaaggataacggcatcggcatgagccaggagtttgcccaaaagatctttgaacccttcgagcgggagcgcacctccacggtaagccgcatccagggcaccggccttggcatggccatcaccaaaaacatcgtggatatgatgggcggcaccatcgaggtgcagacagcgcagggcaagggcaccgagtttaccgtctgcgtgcccatgcgcgcacagaccgagcagcgcccggtggaaaagatcaccgagctggagggcctgaaggcactggtggtggatgacgacttcaacacctgcgacagcatgacaaagatgctggtcaaggtgggcatgcgcgccgagtggaccctttccggcaaggaagcggtgctgcgtgcgcggcagtctatcgagatgagcgatgtctaccacgcctatatcatcgactggcgtctgccggatatgaacggcatcgaggtcacccgccagatccgcagcctgcacgatgatacgcctattatcatcctgaccgcctacgactggtcggatattgaagtagaagcaaaagcagccggcgtgaccgccttctgctccaagcccatgttcatgtccgacctgcgcgagaccctgatgagcgcccttggccagaagccggcggatgcagtgcagaggcttttgccggaaaagaacgccgacttcaagggcaagcacatcctgctggtggaggacaacgaactgaaccgcgagatcgcgcaggagattctgcaggagtacggcttccttgtcgattcggctgaaaacggcgctgtggcggtggaaaaggtgagcactgccgcgccgggcagctatgatctggtactaatggatgtgcagatgccgatcatggacggctataccgccacccggaagatccgcgcactggacgacccggcgcgggcaaagctgccgatccttgccatgaccgccaacgcctttgacgaggaccgccgcaacgccttggaaagcggcatgaacggctttttgtccaagcccatcgtgatcggcgaccttgtgcaggagctgcacaaaattttgtaaatgaaacgccggtcaggtgaataaaaaaagaatgcacccgcagcatttgtgcccggaggccaaaacctctgaaaagcttgctgcgggcgcttttttgtttccattgtctttaaaaaactcttgacaatgggaacttttttgattatagtagagctaacaaacattagttagtgaagggcaaagaaaaatggaagataccaagcagcgcattctggaaaagtctctggaactgttttcgaccaaaggatacgatgccgtcagtgtgggcgagattgcaaaggcggtcggcatcaaggcaccctcgctgtacaatcatttccccagtaaacaggccatttttgatgcgattttggagacaacttcggcacactaccaaaaagacaccgctgagattgcggtccatgtacaggattctcaaaaagacatcccggttttctctcatatctcggaggagctgctggttgaaaaagtccgacagattttcctctattcgctgcacgataaaaccatcagccagttccgccggatgatgacgttggaacagttccgttccccccaatttgccgaactgctttccaaacgctatgtagattggatgatctcctaccatgcaggcatcttccgtgcgctggttgcaaacggcgaactgcgaaacgaagaccctgatacgctggcgtggatgtatgtttctcctatcatcgtcctgctcagtgtctgcgaccgccagccggaacgggaagctgaaagccttgaaaagttggacgcccatgtaaagctgttcttccgcacctttaacatcgaggggggtgaaaaataaaggaatttttgaatttgaattttatattgaagtagaaaaacaccataaatgctaaaatcaaaggagaactttttgaaacatacaacatttgcactggagcttgtgggctgaccgggaggtctggcaaataccacaagccacgcctcccgaagacgaacagacacaattcttcaggaggacattaccatgaatcgtgaaaataaacgcaagacctttgaaaaaggttactataagacccacgcctgcaacgacacctttacctgcaaagtctgcggacgggtctgcaccccgcaaaatgccggcagcgaccaccgcaaccattgccccaactgcctgtccagccttcatgtggacgaagaacccggtgaccgcgcctccgactgcggcggcatcatggagccggtagccgtctgggtacgcaaagacggcgagtgggccatcatccaccgttgcaaacgctgcggaaaactcagctccaaccgtgtggcggcagacgacaaccccatgaagctcatgagcattgccatgaagccgctgtgctctccgccgttcccgctggactatattgaggaaatgaccgccctgatgggcggtgatggacggatgcggtaagccgcaggaggaactacaagatggagtatatccgaatcacaaaagaaaacatcgacaaggaacacatctgttgtgccatgtccggtcaacagagccttgccaagaaggaatggctcaagcagcgctttgaggaggggcttgttttttaccgcagtgcagagcgcggcaaatgctttatcgagtacatcccggcagaaaacgcatgggtgcccattgatgccgatggctatctgtacatcaactgcctgtgggtctccggctccctgaaggggcacggctattctggcgaactgctggaagaatgccttcgggatgccaaggcgcagggcaaaaacggcgtttgtattctgtgtgcagaagggcgcaaacgggagtttctcgctgacccaaagtttttgacccataagggcttcaaggtttcggacatctccgattgcggcatcaacctcatgtacctgccccttgcagaaagtgccccgcagccaaaattcaaggcctgcgccaagcaccccaaggtggaggaaaacggctttgtcctctactataccgaccagtgcccctacacctattattgggtgccaaaggtgcaggaggccgcaaaggaacatgggattccgttcaaagccatccacgtcacagagaaagagacggcacagaatgtgcccgcacctgtcacaacatacgcattgttccgtgatgggaaattcgtgacacagggcatccagtcggacaagaaatttttgaaattagcaggcgcagcggattgagagattcaggaggaaaaatgcaatacgatcaaacggttatcacaccaaaaggacgggcagtccacatccgaaacggtgtggcatccgatggaagcgctgtgcttgaaaactttgatttgacacacgcagaaacagattatctgctgagttatcccgatgaaaatcactttgatgcggaacaggaaagccgctacttggagaaaaaagcaaccagtccgaatgagatcgaactgatcgcctttgtggacggtaaagtggcaggaactgctggaattgatgcaatcggagcgcagtataaagtggcgcatcgtgccgaatttggcgtcagcatcctaaaagagtattggggtctggggatcgggcgagccttgatggaagcctgtatccattgcgctaaaaccgccggatacgctcagttggagctggatgtagtggcggagaacgcaagagcaatctccatgtaccagacggcaggatttgtggaatatggcagaaacccaaaaggttttcgctctcggaacgctggatttcaagaactgatctccatgcggctggaattgtaaagcttatcgactgaaaacagccctcctgaccatgacggccgggagggctgtttttggtagggaggttgaccagtatgaggacaatacccggactaccgcaaggcaaggaatgagatgcagaaactagttcgggcacagaaaaatgtagaacgtttttttgcagaggaaaagaacaccaccgagaaaacacagacacgttaaaaaagtcgccgaggagctttccctgttgggaggcatcctcggcggattttttagtttatatagcagctttgcggagcaatgcgcctgttacccgtatgttttccctacgatctttccgcgtgctgcggcgggcagaagcttgcacagcaggctcaggaacttatactgtgcaccggcaacataaacgaccgccggcttctttttctccacaataccggcgatgtaccgtccaatgcgtgccgggtccatgccgttttgctcgtcgtgctccatctgactgacgctccgggagatacgtccgccgtattcatcatcgccgagaatgcttttctgacgtgcttttgtaaatccggtgcagatgtcacccaattctacgacggtaacatggatgccgtagggcttgacttcatttgccagagcataagagtaagaggaaacggcggctttgcttgcggagtagaaggtctggaacggaatgtgcgctacggcagcaacagagctgatgttcacaatatgccccttcccttgatggcgcaggaaggggagaaccgctttattcacagtgactgtcccgaaaaagttcacatcaaactgtgctttggcttgctccatggacgtaaactccaccgcaccggaaatgccaaagcctgcacagttgaccaccgcatcaattttggtctctttttggatgacctgctgcacggcggcggtgacagcgtcttcatcggtcacatcgacggatagatgggtgacaccctccatagggatacttctgcggctgaactcatagacgatgcagccgttctccttcagagcggatgccgtgcaccgcccgatgccggagcttcctccggtaacaatgacgaccttgttgttttctcccaccatgattttcctcctgaaaatgttgatttggttcgagtataccgcatcgcagggcgactgtctatacggatagccggatcgtggaaaagtacagggatcaacttgcgtaaattttcacacagattggcctctcttttttacacagccaatgccaattagcgcttgaaaacgaaacgctgcgcaagtatactatactagctatactgtacaagcttgatcacaaatcagtatgccagttgaccataaaagacataccagaattgaagcatgcggcggggtcaaaaccctacgaggatgaaaatgaaattcgatagaagacttacagatgaaatctacacttccgatacggtaaggctgggaaaaaatgcatttcaggccatgcaggagacgatctatcataatggcggtgtcggaaccattaccgggtactatgatgccgaattgtcgatcctgtcggtcagtgatctgttgctgcataatctgaaccacagctatgcatccctgatggaacagacaaagggttcgctgaagaatcttttctataagaaagatgccgcattcctcgacaatgcacgctttcgtcagctccaaggcgaaggggaaggccggatcctcacggcagatggggctcccgtctatgtgcgtctctacaaaaaagatgcagtcgatacggatggaacaccgatctggatcatgtcagtacagatgaactgggcgtatgagaaccttgcgctggttaatgaatccatccattctgcactatggtattttgagtgtaatgaaaacggtgagatcgttcatgtgaactggagccatgcgttccggcagatccttggatatcatgacattctggattttccgaacaaactggattcgtggtcgaaccttctgcacccggaggactatgaccgggtaatgcagctgcttttggaagcgattgcggacaaaaccaatgctacgaagtataatgttgagtaccgactgaaaatgcaggatggccaataccactggttccgggcatcggcggaggtgatacgccgtctggatggttcggccaatcgaattgccggaatcatcagcaacattgacgcggaaaaaagaagccggatgcaggcgcagcgggcagcggcatttcaccgtgcatttaccagcgcaaacctctgcgaatactatgtaaatctggaaaagaacacctttgacactttcaaagtggagccctctttgatgacggcctttgagcagaaccacacatgggatggactagtcagattccttgtggataactatgtggttgaagaggacaaaaagtctgtaacgaatttctacaatcgcgcctacatcacggaaaaactaaaggggcttgagacggagctgcgtcaggagtgccgcatcgttctgaatggggaggaacgatgggtcagcaacgtggtcatgcgcggcgagatcgaagattccgaatatgcgatgatttttctgcgggacatcacagagtccaaagcagagacggcacggcggatgcagatggcctcagataacgcatcgatggatcttttgatcaagagtatggtgcgtctgctggaccgctttgtcgtctgcgatctggagaatgaccggtatcggttctataatctgcaaggtgaaatgatatacgcgccgacgggaacctaccatgattttgtggagcaggtggctgtaaggtataagacgttggagccattggcggcgatagacgcattgttctcaccggaaaatatccgaaagaatttgcaggatgagaacgacatctacaaatttgaatactgctccatggatgagaacacctataagatcgcttccttcattccgctggagtgggatggcacaaagctggtcaaagcactgttggcatctatggatgtgtcacaggagaaaaaggccgagatcgaatcccataaggcactgaaggatgcgtaccgggcggcggaaaacgcaagccgcgccaagacagaatttctctccaatatgtcccatgatatccgtacaccgatgaatgcaatcgttggcttgaccgccattgcgggtgcgaatatcgagagtcaggacagggtggtcgagtgccttggcaagatcacaaagtcgagtcgtcatctgttgggactgatcaatgaagtgctggatatggccagaatcgagagcgggcgaataagccttgccgaggaggatttcagactgccggagctggtcgataacctgctcaccctcacaaaaccggcaatcgacgagcaccaccatcagctcgaagtccatgttgagcacatcgagcacgaagccgtctgcggcgacagcctgcgcatccagcaggtctttgtgaac

SEQ ID NO: 13840 - DNA, 1336 bp, Unknown
  gut microbiota DNA sequence
aatgaatgcaatcgttggtttgaccgccattgcgggtgcgaatatcgagagccaggacagggtggtcgagtgccttggcaagatcacaaagtcgagccgtcatctgttgggactgatcaatgaagtgctggatatggccagaatcgagagcgggcgaatgagccttgccgaggaggatttcagcctgccggagctggtcgataacctgctcaccctcacaaaaccggcaatcgacgagcacaaacatcagctcgaagtccatgttgagcacatcgagcacgaagctgtctgcggcgacagcctgcgcatccagcaggtctttgtgaacctaatgagcaacgccgtcaagtacaccccggatggcggaaacatcacccttacgatcaaggaaaaaccgaacggcttctcggagcttggctgctacgagttttccatcgaggacaacggcatcggtatgacgccggagttccagaagatcatgttcgagccgttcagccgggcagacgaccaccggacgaccaaggtgcagggcaccggtcttggtatggccattgcaagaaacatcgtcaacctgatgaatggtgacattcaggtcgaaagcgctcccaacaagggaacgaagatcacggtcacggtctatctgaagcttcaggagaacgagaaggaacaggaaaaagaactgctcgatctgccggtactggtcgtggacgatgacaagacctgctgcgaaagcaccgttgcaacccttcaggagatcggcatagcgggcgaatgggtcctgaccggcaaggaagccgtggaacgctgcgcggcgcggcacaagaccggccgcgactattttgcggtgatcctggactggaagatgccggagatggacggcatcgcaacggccagaaggattcgggaatgcgttggggaggaagtcacgatcatcatcctgacttcctttgatttcagcgagattgaagaagaagccagagcagtgggcgtgaatgcgtttatggcaaaaccgctgttccgttctcgtctgacggcaactctgcgacagtttacatccgggaagaaggagaaaaacgcccggaactatctggaagattttgcgaaggaaaactatgcgggcaagcggatccttcttgtggaagacaatgcgctgaaccgtgagatcgcaaccgagatcataggcatgacgggcgtgaccattgacattgccgaaaacggaaaaattgcagtcgaaaaggtgatggaagcgccagaaaagtggtacgatctcatttttatggacatccagatgcccatcatgaatggttacgaagccactgctgcgatccgtgcgctt

SEQ ID NO: 13841 - DNA, 12626 bp, Unknown
  gut microbiota DNA sequence
cagcaggcgatacaaccagcggagaactggacagcttcaacggtcaaaaagtgaccgtcaccgcccagatcgatgaaactgacgagcgaaaatttgacggctgggaagtagtaaatgctcccgcaggctttacgatctctgccgaaaaactggcgcagaaggaattttcgttcatcatgcctacaggcaatgtagaactgaccgcacaccacagcaacaagcttgaggtgtccggcggtactgccaaagtgaacggtaacagcaatgcagactttgcccgcccgggcgcagccgttaccgtgaccgcaggcagccccgaggattaccagtttgaccactgggaggtatctggcggcaatatcggcaagaccgaagaggagctgaaggtcagccctctgagcttcaccatgccggatgcagccgtcaagctgaccgctgtctacaaggctgctgtcaaggtgagcaacggtactgcccaaacggacaataccaccggtgagacggtgtatgcactggagggtgcatccgttaccgtgaccggtcacgacagcaacgcaagcttttccaaactcgtaggctggaagctcaaaaagggcagccttactgcaatcatcgatgcggacggcaatagcctgaatgttacggtggacgcagaaaacaattatctgctggatgccagcggggcaaagatcaaaaacgaaacttttacgttcaccatgtctgacaagcctgtggaactgagtgctgtctacagtattcccgccatcgcaatgagtctgccggtcatcgtggaaggcggtacaatcaatggcacgcaggacagctttgtgcgtgtaaaggcgggcgaaaaagtcacgatcaaggctgatgcacctgctgaaaacatgcaattccatcactggaaagtggaagaaggcaccagcgcggactttggcgtaacggtcggcacgcttggctctgatacggagcagggtactgaggagatcgcattcatcatgccccggggtgctgtcagactgacagcacagtggtccgctactccggcgacccgacccgatccagatcagccgctggacgaggatttcggtgttgatactcctcagccgaagcccgaacctgaagagcccgaagcacccgcagagtccgccgccggtgctattgcagcagtcgccattggcggcgcagcagtctggggcggctacgagatcactacccgcgccatcctgaagaacctgctgcccgcagatgcagccatccccaagactcagggccagctggctgagctgctgtggcagaacgcaggctgcccccagcccaccattgcacaagccaccgatgccgctgccgccgcccgctggtgtgtcgagcagggctatctggaagaggatttcgccccggaaaagtatgtacccaaatacaaggtgatccgtatcctcaaacaggctaaaagcgccacataacctctgatatcatctcacatcactgcacaaaaatggacggaggagcgtctttgacgtttctccgtccattttcttttaacacactcagaccagctttggcacctctgcggtcagcagctctgccagccgggcgtgacccttgcaagtcaggtgcataaagtccacctcgttgaactcgcactcggcggcatccataaagtgcacgccctgccgctcggctacgatgcgcagctgctcggcgaccccgcgggatttttccacgcagcctgcgcccatgacggcatcgtggaagccgtccttgatgcagggcggcgccaccaccagaatgttgggtgctttgccgccccagcagtccacgcttttcaccttgagcagcagccgctccatgcccgcaccgatgcaggcggcattggccccaaagcgttccttgacgtcattcgtgcccagcatgatgaccagcagatcgatgacctcgtggctcttgagcagggcgtaggccacgctcagtgcatccatggactcatgcagcggatccacgaacacggtggtgcggccggaaagcccttcctcggtgaccagatactcctcgcccagcgccttttgcaggcggcaggtccagcgctcgtcctcgttgaagcggatgccgtggtcggcgcagtcgttggggtcggcgcaatagccgtgggtgttggaatcacccagacagagaatatgctttttcataatcgaatcactccttttccatcgtctgccggaagtagtacacagcgcccaccatcccggcatcgttgtgcagctgcgcggcacgaatttccagtccctcggcaaaggcgggcatgacggatgctttcaccttttcagcgataggctcgatgagcagcttctgctgggcagacacgccgccgccaatcaggatcagctgcgggttgaagatatgcaccatgcctgcaagtccctgcgcgatctcgtccgtccatgcgtccagcagcgccagcacggtctcgttgcccacttctgcggcggcaaagatggcgcggccatccttccatgccgggtccttttcctgcgcggcgcgcaccagagcagtggtggcggcgtagcgctcccagcagccctttgcgccgcaggtgcagtccacgccgtccagcgcgtgggtgcggtagtgtcccagctcgccgcccagaccccgcgcaccttccagcagacggcctccggtcaggatgccgccgcccacgccggtgcccagcgtcacgccgatgacgtccgtatagccctgtgcaccgccgacccacacctcgcccagtgtcatgcagttggcgtcgttggctaccgtgaccggcagaccaaaggtcttttccagctccgccttgatgggtgcgccgatgtagttgggcaggttgccgcaggtgcccgccacgatgcccttgcggctgtcgatctgcccggtggcagaaacgccgatgcccgcaaggctttccgccgggacgctctgcgcggcaaggaaagcttgtgcagccttcagcacggtggtcaggatgggggtgcggtagccgtcaaaacttacgctctcctcggctttggccagcaccgcgccagtctcgtccacgatgcccagcttgacggcggtgccgccgatgtcgataccaagatagtgtttcatagcaggcactcccttgtgttattttttagcggcgttgatggcaccggtaaagcgtgcggtgatctctgccgggcgggtaatggcaccacccaccaccagtgcaaacgcaccggcttccagtgccttgaccgcctgttccgggtagtggatgtgaccttcggcaatgatctttgccgggcactctgccgccagcttgcggatgaagtcaaagtcgatatcgtcaatgccggtggtctcgggagtgtagccgcgcatggtggtgcccacaaagtcagcaccggcctcggcgcagagcatggcgttttcaaagttatcgcaatcagccatcaccagctgttcggggtactttgccttgatggcgcggatgaactgcgcggaggtagagccgtccgggcgcagcgcaccggtgccctgcacggcaaggatatccaccccgcaggccaccagctcgtccacttccttcatggtgacggtgatgtacatgggcgtgccggggtaatcctttttgatgatgccgatgaccggcaggtccaccacctgcttgatctgggtaatgtcccgcacggtgttggcacggatgcccacagccccgctcatggcggcagccttggccatcaggggcatcacgccgccctccttggtatacagcggctcgtgctccaatgcctgacaggacacgatgagtccgcccttgatctgtgcaaacagcttttccttatccatggtcttactcctccattctgatcttgacaacggccttgcgcacgctgacacagccgtgctgtacaaggccgggcttatgcagctcctccgggaagaacagtacaaagcgtccttcgcccagtgcaccggtcactacactggcgctgtcctgaaagccgcagtccccagtaaactccccgatctccgcgccgggcagattggtgtagccccagccctcgctgccggtaaggtctacctgtaaatcagcataaagtttgtggtactccgggtggtagcccgcgtccgggtgcagggtggcatccatcaggttgatgaacaccttgtcgccgtccacctcggtgcgtcccagcggcagggcggcaaggtcgtgggtaagcagatagtcaatggcggtatccaagttggggtgcagtcccctgtaccggcccagatgctgcaaggtatcgcagatcattcgcgtttcctccaataaaagaagcgcccgcctcccctctgaaaaagagacggagaggggcgcttttatcctgttacagctttgcgatggcagcttcgatcatggcctgtgcctcggcaacgatgggctcatcctcggggatcaggccgggcatcggggcgcgcacgctgcccagctccagaccgtacatccggcgcaggatttccttttgcacggcatacagattgccgtgggcagagcacatcttgtagataatgcggttggcctcgtactggatggcgcgggcctttgcgatctcacccttttccagatgggcgttcatggccagatacagctccggcatcacggcgtaggtgccgccgataccgccgtctgcgccgatgacgcggccggaaacgaactgctcgtccgggccattgaacaccacaaagttgccctcgccgcgggcggcaatgccggcatccttgaacatctggatgtcctgcgtgggcatggagctgtttttcacggccaccacgttggggttcttcagcatctcgttcagcaggctcatggtcagcgccgtgccagccagctgcgggatgttgtagatgacgaactcggtgttgggtgctgctgcggacatatcgttccagtacttggcaatggcgtactccggcaggtggaagtagatgggcgggatggaggcaatggcatccacgcccacgctctcggcgtggcgtgccagctccatgctgtcggcggtgttgttgcagccaacgtgggcaatcacggtcagcttgcccttggcttcgctcatcacggcttccagcaccgtcttgcgctcctcgacgtgctggtagatgcactcgccggaggagccgcccacatacacgcccttgacgcccttggcgatcaggtgacgggtcagcgccttgaccccctccaccgaaatgttgccctctgcgtcatagcaggcgtaaaaggcagggatgacaccctgatattttttgatatctttcatgtttcaagcccttctttgcaatcagtaataattcaagataaaatagtcgttcgtatcaggttctgaggctttttgctccgggcggggggtatttttgccctcttgccgctgtcgcaattttagcccttgaccgcacccattgcgatgccctttgtgaagtacttctggaagatgaggaagatgatgatgatcggcactgcggccagtgcggcaccggccatgatcaggccgaagtcggtgctgttctctgcctgcagttttgcaatgcccagcgagatggtcaggttgctggtgctggacagcatgatcaactgcatgaagtagtcgttccagctgttgatgaaggtaaagatggccagtgcaccgataccgggcttgaccatgggcagcacgatcttgacaaaggtgcgtgcctcgctggcaccgtcgatgcgggcagcttccagcatttctgtggggatgccctcactgaactgcttcatcaggaacacgccgaacggccagcccacgatggggaagatgaccgcccagatggtgttgtacaggttcagtgcgctcatctcccgcagcagggggatcaggatgacctgcttgggcagtgccatagcgcagacgatgagggtgaacagcagcttgcggcccacaaagcgctttttggccagcgcataaccggccatggcggcggtcaggcaggtaaggatcatggacataacggccatgaacacagtgttgatcatccagcggatggcagcgggagccatggggcctaccgagaagtagacgggctcgccgctggcgctgaatttggagccgaagggcacagccagctgccacagcggggcacgcttgccggcaaacagcttctggtagttggtcagcacccactggctgggccaccactcgggggtagtggcgttgatggcggcaccggtcttgaaggagccggtgatgatccagtacagcgggaaggcgaacagcaccgccatgatgctgatgaggatgatcgccagaatggcgtaggcgctcatctttttcagtttactgggatggcgctccaacggtttttgcttttttgcagcagttgcacgcattgttccgcacctccttaattatccttgttgcccagcttgaactggacagcagacagaatggcgatgatcaccgccagcaccacgcccatggcgttgccgtagccgtacttgtactgcttgaaggcggtgtagtagatgtagtacataatggtatcggtcttgtggttggggccgccggaggtcagcagctggatcagtgcaaagcactggaaggagttgatggtggtgatgaccagaatgtacagggtggtgggcataatggccggccacttgatcttccagaagcactggaagtcggtcgcgccgtccacttcggcagcctccacgatggactgatccacgttgcccagtgccgaaacgtacagcacgatgggctgacccacggaggtagtgagcaaaatcaggatgatacagcccagtgcaaaccgctcgtcacccagccagttgatgttcttgtccagaataccaaggctcttgcccagatagttgaagatgccatagtagttgttgtacatccacttccacaccacggtaacagcgacagagccggtgaccacgggcaggtagaacacgcagcggaaaaggctggtggcccactccggcaggtctacgatggcggaggacacccacagcgagaagatgcaggtgatgggcaccgacacgataacgatgacgaaggtgttctttaatgcgccaaggaagatggggtcggcaaacagggtcttgtagtttgccatccccacaaagatatccgcgcggttcatggtggagtcaaagaagctggtcaccacgcagaggatcatggggtagatgacgaagcccagaaagaagatcaggctgggcagcaggaagcagtaggaggcgaaggtttcgcgccgtaccagcgcactgctgcgtttgggctctttcattgccgtctttgcagccaagaggatcaccagacctttcgtttgagagtgttttttccgtaaaaaggcccctccctcacccggaggaaggggccatgcggttcagctgtaatgcagttcagagaaactagcgcttatgcctcggcagcagcggctgcgtttgcgttgtccacaaaggtcttgacggcagtctcgacggcctcgccggatcccacgcgctgcagcatgttccaccactcggtacgggcagtggtccagcccggggtgatctggtagtagtcgcccagatagcccatgaacttgctgtactcgctcatgacctcgttgccggcgtagatgtcgcccacgctggtgcggacggggaagtaggtggaagccagcacgctgtccttgacctgagaggggtcggcagcgatgaactcaataaaggtctttgcagccttgatcttggcctcgtcgccgttatcaaagatgccgaagccccagatgccgccgcacagcttcgggtcgccgctttcggtggggaatgccatggggaagatctcgtcgccgctgatggtctggcctgcggcagcggtgtcagcgttcagctgctgtgcaatgttccagcagaaagccatctgcagggtgccgttgcggaacagggtgatctcctcgccgccgttgatggagggatcgaagttgacgccctttgcatcgtacagagcctgaatggccttgatgttctcggcagagtcggcggtgtacttggtgtgggctgcatcggtaaaggtgccgccgtacatattgttgatgatggcgcgggtgccctggtcgccgccctgaccgctgcagtagatggctgccacgttctcgtagccgcccttgtacagtgcgtccacagtgttcaggaagccctcggtgctccaagtgtgcttgtcggtatcaatgtacttgtccgcgcccacttccttgaccttggtcatgttcacggccatgcagtgtgcggtcatgcacagggggtactcgtagtagtcgcccttctcgttgtggcaggcagactccacagaagcgtagatgtctttcttggcatcatcggtccacagatcgttcagcggagccataacgcccttggcaccccagttggccaccagacgctcggggccttccatgaccagatcgggtgcgctgccgccctcgatggcggtgttcacctgatcgtcgccgttggtgtagtccagatactccacggtcaccttgatatcgggatactttgcgttgaagctggagatcaggttctggacagtctcgtcattgccccagccgccgatggggtatgtccacagcttgatgcttgcgccggtgctggctgcacttgcagcagcagaggaagcggtggaggaagcagcagtgctggtggaggaggaaccgccgcaggcggccagtgcaccggcagcgcccagaataccggcagccttcaggaaggaacggcgggaaatgcagtttttcatggtagattctccttgttcatcttcttcgacccatcgggggatcgtactccgttttgctcgtagcggctgctcgtgtccgcagccgttgtttgtagcctaattatagaaaattattttcattttgtctattcgttcttttcataaattttcatttttaaacccggcagcctgcacaaaattgtgggatatcagaaaaaacacaatattttcatccactttacttgtcaaaatagttacaaaacggtacactttccccggttgctctgaaaatcactttcagctttgaaattgtaaaaatgaaaagcattttcaccatttgggccgttttttccttcaaaactgtgccctctgcacagaatcggcgggtaaaatgtgttcattacgcctcttgcacagcggcgcggtttctcttatacttttatataagaaggtaagcacgaacacggcaccggcacccgccggcggcctaagtcaggagagggaagaatgtctacaaatttttgggagctgctgcagcagcatcagggcgacctgacaaaatccggccgcacggtggccgaatatctggtgcagcacgctgcggaggcacagtatctgtccatatcatcgctggccagagagtgtcaggtggccgaggccacggtgttccggttctgccgggcgctgggctttgagggctaccacgaaatgcgcattgcgctggcgcaggccaatgccaccggtgtgctggtaaaccagcaggagcccgccccggacgccgacactgccaccctgtgcgagcacgcctcagcactgttcatgaccgccatcaatggcacccagaacgccctttcgccgcaggcggtggatcaggctgtggcgctgctgcacagcgcccggcaggtgttctgcatgggacagggcggcagcatggccgccgccaaagagatctgcgcccggttcgcctgcatcaccaacaagttccgtgccaccgccgacagccacatgcaggtcatggctgccagcctgatgaccgagcaggacgtggtgctattcgtctcctactccggcgctacccgggacctgatagagaccctgcgcactgccaaggccaacggcgcaaatatcatcctgatcacccactacgaggactcccccggtgcaaaactggcagacatcgtgctgctgtgcggcgcacaggaaagcccgctggattccggcagcatccccatcaaggtggcggtgctgtatgtagccgaagtgctggtgctgcggtacattctggacgataagcccggcagcaccgaagcgcaggagcgcaccaccgaggcgctggctgtaaagatgctttgagcatcgaactaaaattttagggataacggagcatccggggatgctccgttatcccttttttacgcaaaaaaatcggtcagacccgcaggcctgaccgatttccagcttatcaatgatgttgcagcgctgtacgcttagtcgcggcggcggctgttaagacccagcagacgcaccacatacaggaagatgttgatgaagtccagatacagcgtcagtgcgccgtagatggaagccttttccgccagctcgctgtcccctgcgtagtaggagtacatctggctcagcttctgggtgtcgtaggcggtcagcagcatgaacaccaccagaccgatgccggagtacagcaccgtgcccataaagcccatgccaaacagcacaccgacgaagccggtgataatcagcgcaaacagtgccatcatcagtttggggccccagccggacagatctttgtgggtggtggtgccgtagactgccatcagaccgaagtacagcgaggtggcaaggaaagccagcaccagtgtgcccagatcaaaggcaaggaaatagtagctcagtaccatgccgttgagcagggcgtagcctaagaacacccctcttgccgcacccacggacatattctgcacccgggcgctcagcacgatcaccagcgccagctcggcaatggtgaacagcaggtacagcgaattgaccacataaaacagcggggtggtggcggttacaaacgccgccgcaaaggtgatcagcagtcccagcgccatccagcggtaggtgcgggtcatataatcagccgaggtcattgtaggctctgcatagccacggttgtaattgttataactcatctgggttcctccagtctattctgcggagcatttctctcttgctccggtctacggaatatagtatactgcatagaaatgaacgtttcatgaaaaaggctgtgatattgtatgtcccttggactttatctgcatattccctactgtttttccaaatgtcggtactgcgatttttattcccgccccggagagcggggcgtaccggacgcctatgtggacgcgctgctgcgggagctacaccgctttgcgccggatgcgcccctgcggccggacaccctttatttcggcggcggcacgcccagcctgctcaccccggcgcaggcagaacggctcatccgggcagcagagcctgtgcccggtgcagagatcaccttggaagcaaaccctgagaccgtcaccgaggagagcctgcggggcttccgggcggcaggggtgaaccgcatctccttcggggtgcaatctgcccgggacacccagctgcgcacccttggccgtccccacagcgccaagcaggcgcgggcagcctttgccgccgcccggcgcgccggattcgagaatatcagcggcgacatcatgctggcgctgccccactatacgcaggccgaatttgacgagacactggagctgatcgaaaaaggcggtgccacccacatctcggcttaccttttaaaaatcgagccggactccgccttcggcaagcacccgccagagggtctgcccacaagcgatgaagccgccgatttctacctttatgccgtggagcagctggaacaccacggctaccgccagtacgagatctccaactttgcaaagccgggctacgaggggaagcataacctcatctactgggactgcggcgactatctgggccttggccctgcggcacactcctgcatgggcggcaagcggttctgctacgcgccggacaccgccgcctttctgcaggacgccgccgcacccatcatggacggcagctgcggcgccgaggactacctgatcttgcagctgcggctgcgcaaggggcttgacctcgaagcctacaaaaccctgtacggcaagcagttttccaccgcacagctggcctttgtgcaaaactgtgtccgtgccgggtacgccacctttgatggccgcattctcgccctgacccccgccgggcttattgtgcaaaacagtattcttgcacagctgctctgatgggagggcgaagcagaaatagcaggaaaaagtatcgtaaaacaaaaccgcagcgtattttgatacgttgcggttttttggtgggcgcgggtggatgtcgcgagccgcgcagaaaaggaacccgggtcgcggctcccagcggctgcatcgtgccttgggcggcacgcgcatcctgctggccgcagccccaacagctcctccctgtttctgccgctggcagcggtcgtcgctgttgcacaggggcttttttccccgccggactattcggcgggtcttacgagttgcgcttgccgctttttccgcagccccttggcagggctttgaaaaagcggagcgctgccccagcctcgcctccctgtttccgccgcaggcggcggtcggctccgctgctgttcgaatccacccttgcagccccttttgcaaggcagataaaacagaaactccggtacccattggataccggagttcttggtgg

SEQ ID NO: 13842 - DNA, 2072 bp, Unknown
  gut microbiota DNA sequence
aacagaaactccggtacccattggataccggagttcttggtggagcgaagcaacccaaatccgaaccattgccctctggggcatctttggcggcgatttcatcgaaagtgatggtttttgtgccgtctttgtagttgaatgtaatcaaaactttttcatcatagagataaacagcattcacgaatgtattgataagcgtttcccggtggcttttcacgttcgggtcgagcttgcggaaccgggttagccagaaacgaacctgattttcgcttaaccgtggccgagcgattttttcttcggcaatccgaatctcaagttctttctgctgggcttccagcttttccaaacgcgatttggtggagttggtcagcacacctgcttggatggcgttcagcatattctcaatgccgttctctacctcgcgcatctgcttttccagcaaagggagtgtggtgttttcctgatcctgcaactccatcacttccgcaacgatggcatcgatcacggcatcgtcttgaatcagcttcatggtttcagctacgaccaaatcttccagccattccttacggacggtctttttcttgcaggtcttgaaacgcttcgcggtggcgcacttataataatgatgaacgaccttgtttctacccgtaccgcactcgccgaacatcatcgcgccgcacattccgcagaacagcttggtggtgagcaagtaatcgtcctcggccttgtgacgggcaggagcgcggctgttcttcttgattttttgctgcacttcttcaaacaagtccttgtccacgatggctgggatgctgtcgggcatcacaatgtccttgaagtggttttctccgatgtaccgtttgttcgtcagcagcttctgaacactgttgtaggtgaacttctgattgcggttggtggtcacgccactgtcgttcagccagttcatcagttccttcatagttgcgccatcgttgtaccgctggaaggcttctaccacaaagggagctttcagcgggtcgacttgaaagaacttttcctcgtccaccttgaagccgatgggaactgtaccaccgttgtacttgcctttcagaacattctcggtcatgccgcgcacgaccttttcagaaagttctgccgagtagtattcagccatgccggtgagcatactcttgaccatgatacccgcagggctgtcagagataggctccgtggcagataccagcttgacatgatttcgttccaactggtactcatagtgggccgaatcatagcggtttcgggcaaaacggtcaagcttccagaccagtacgatgtcaaacagccgtttctcgctgtccttgatcatctgctggaaatccgggcggttgtcggttttggcggaaagggcgcggtcaatgtagtgcttgaccacggtgatgccgttcttttcggcataagctgtacattcacgaatctggccttcgatggattcttcacgctggttatcgctggaatagcgggcgtaaatcacggcggtcatgcaaacacccctttcacttcattctccgtaggcggcgcacaaggtcggatgcactgtacagcacacgggccaccgacacagcatcctcgcccacaatgtaaaacaccgagtagttatccaccagcatctgccgcagcccttgggtgcgctccggctcgctctctaccagcgcacagcgttccggcaggatgttcagcgactggatggcttccgcaatgcggttatactgccccatagccgtgtcagtctccaacagacggttagcaatatagctgtaaatctgctccatatcgctgagggctgcatgggagatttttacgtcatactgcttcatcggtgctgttccctgaactgtgcgaatgcgcttgcggcatccacggtgtcaccgttctgcacttccttaatgcccacctgcaaggctgcatggagttggtcatcggtcatggtgtcagcgttcagagccgcaggagctttcggcagggacagcgagaaggggatgccgccagtcagggtgatctggcgcaggtacatatcaatggctgttgccatcgggatg

SEQ ID NO: 13843 - DNA, 35675 bp, Unknown
  gut microbiota DNA sequence
aatacagccgcccatcggggtgcgatacaagcaagttgctatccgatgacctcaaaaacaaattgtactacgatggttttcaaagaatgctgtatcactactcgcaccaaacaatgaaaatccgaaccttttctcaataggagaagggttcggattttttgtattctttggaaaacagaacgaatcccttgcttccatcgaaaaacgtcctagaccttatcataaaaaagcacgacagaccactgtaagagtgccgtaaggcggaaaggacacaaatatgaagtacgatgaaagagcctgcaagttcaacatggacaccggctgcgtggaactgctgctccgggatgggagaatgatctccatcaactgcactggggtcgaggatgaattggacgtgaccatggcgcagaggacggaactggattatctcatctacaacgacccgctggcgtatgcagacctgattctaaacggcgagccggaagaatatttgaaaaatacggctgggaaccatgggttagaagattaagagaaatgccgttccaaaagcaactggaacggcatttcttatctttcgatattcggcatcttctgtccccgaagctcctgccggatggcacggaactgatcaggtacatccgcatcggtcattgcaccggggacatccactgtcccagcggctttggcggcttcatagaaccagcatttatactccacggtctccagcgtgtgctgtaactgctggatctgctgggtgagtacctcgcgctgatgccggaacatttccagccgggtgtcaatggtgtcgtctccctgcatggaaagctcaatatactgccggatatccttgatggacattccggcttttttcatgcagcggatgacctgcagccactcgaagtcgttttcccggaacatccgaatgccgccggaggaacgctccacaaagggaagtaacccttctttgtcgtagtagcgcagggtggaggcaggtacgcccagcttttgtgccatttcacctacggtatagatcatctgaaacctccgttttttcaaaaagctcttgacttaaagtgcgctttaagttgtatgataaaatcaaactttatcaacatcataatgcggatgcactccgctgtcaaggaggttcctatgagcaagaaggtattgattttgtctggcagtccccggaagggcggcaactctgatattctatgcgacgaatttctgcgtggagcgcaggatgccgggcacaaagcagaaaagatccgggtcgctgagaaaaaggtggctccctgttccggctgctactactgcagcacccacggcggagcctgcgtccacaaggatgatatggcagacatcctgcaaaagatgatcgatgccgatgtcattgtgctggcaagcccggtatacttctactccatcagtgcccagttgaaggcagtgatcgaccgtaccgtggcacggtggcttgaggtcaaagacaaggaattctactacatcaccaccatggcagacgaggaaaaagcctctgcggacactacgctgacctgcttccggggctatgcagactgtgtggaaggtgccgtggaaaaaggcgtccttgtagcaagtggtgtctatgagccgggtgcggtgcgaaacacctctgcaatggcacaggcttacgagatggggaggaacgtataatggcagtaaaacagaccgcagggcgggatgctctgggcgaatttgcaccaaaatttgcagaacttaacgatgaggtactattcgggcaggtgtggagccgagaggataaactctccctccgggaccgcagccttgtgacggtggtggcactgatggcgcagggactgacggactcctcgtttcggtatcacctgacggcagcaaaaaacaatggtattacccggactgaaattgcagagatcctgacccatgcggcattttatgctggctggcccaaggcgtgggcggctttccgcatggcaaaggaagtctgggcagaggacgctgcagaggatgccaaggcaaagcaccagagtgaaatggtgttccccatcggtgcacccaacgacggttttgcacagtatttcagcggaaaaagctatctggcacccttgtccaccgtacaggttggcatttacaacgtcacctttgagccgggctgccggaacaactggcacatccaccatgctgcaaagggcggtggacagatccttgtctgcgtggcaggccggggctactatcaggaatggggcaaagctccgctggagctgcatccgggcgatgtggtgaacattcccccggaggtcaaacactggcacggtgctgcacccgattgctggttctctcatctggcagtggaagtacccggcgaagacacctctaacgagtggtgcgagccggtgccggaagaaacctataaggagttgcggtgatgcgttttgacgtacacccaaccatgatgaaacaaaaacagggtgcgccctgaatggacgcaccctgaaaatccacagacaatagcgatatgtacaacagggctttccccgtcgggaaggccctgtttctctttgctggtggtgtgatgagactgttccgcctgccataggcaagctcgcgtttgcgcagcaacaaaagcctcagtgaaatatcattcaaaggtttccagtgcttccaccagtgcaaggatggtcagcgactggccgtatgccatgggagcaatcagaatgtttttgtagtggtcgcggtcgtagcccatactcgtaccgccggatactttcagcaccgtaccatcggtgtcgatgttcttgaggattgcacggatagcattcttggcacagggcaggtaggaatcatccagaatccccatgcggatgcctttcaggatgccagcggtgatagcagcagagccggaagtttcttcgtagctggtggagtcatccagaaccgtatgccaaaggccgtcctcaccctgaaggtcacgcagtgcgcgcacctgtgctttgtaggtatccagaatgaacgttttgacgccctgattcagcgtacccttaaacatatccagatagtccagaatacccagcgtgaaccagctgttgccgcggcaccagaacacgccgccaaagttgtccatccgattgaacgaccagccgtggaagaacagaccggtgtgggtatcgtacagatatttgatgtgcatcagcacctgcttaatggattcgtcgatccactcctgcttgccgtacttctggcccatccaattgaggaacaagacggtcatgaacagggtgtcgatccacatctcgctctcgtttaggcgaacgccctgacggtcgccgttggcactggtgacgtgctgaaagccaccctcacgggtacgcgggatgcactccatcagccactttgcccaatccagacaaagggcttcaaactcagggtcgtggtaaatctcgttcaattcacacagagtcagcagcggagtagtcgtgttgatattgcgggaaggcagaccctgcgcaatgttctccttgaaccaatcatgcaggaaggtgcggtattcctccgaatcctgcatcttggcgattttgagcagtccgtacaggccgatgccctgcggccagtcccactccttgatgccgaagtcacggctaaaaaatccgatggcctcgccgccttctttcaaagtgtcctcgttttcgggggcaccaaggtgcatcagcttctggataacaagatccagctttttctgaatcagttcttttttgatttcgtttgccataaaaaacacctcatgtatttgtattgtttttctcagcggttgaagtaagcgattttcgatattgtgcaggcgtaacgtgttgatatttcttgaacacacgtcccagataggtgatgctctcaaacccggtacggcttgcgatttcggaaacggaaagtgttgttgtttctaacaggctctgcgctttttttacccgcaggatgttgatgtattcgttgatgccgaagccagtcacttcatggaaggaacggctgagataatacttgctgatataaaactgctcggcaaggctgtccagcgagagcctttcctgaaagtgatcggaaatgtagtctgagatttggtagactgcatcgaactttccgccgctggccttaccctcctgcacatcattcaggcaggcgacctgctgattgctgcgccggaagtagatgaagcctagaatcaactccgaaagaatagcggtctggctcataggctctgccttgtccagttcctccatgatttgcagaaacaatcggcgggtattcgctgtctgcttcggggtcagttcgtaaattccgtagtgcttgtggaagaacgcaccgatcttcagttccgggaacatcttatcgaccttttccacaatgtcccggtctacatagaggatcactcgctcgtattcggtttccgggtctcccacgatggaatgggacatatgaatctggccgctgtccacgagaatcaggttcccggcctgtgcttcataggcgcggttctcaaagaacatctgccgccgcccacggagcaggagataaatttcgtactcctgatggaagtggttgtaccgcatatcaaagtttgccggacgaaccatgtgttccaccataatgccgtttcgtttgcggtaatattgggtcgcatcaccctgaaccatgctgtgcagccatgttgttttcatgaaatgctccttttctcctgaacaggcggtgttcttgccttgattatgtcatatctgttcaggtttgacaagcatttgcaccgtggggcttacatcaggcccagcgtagtaggcagccactcgctcagagcagggatgtatgtgaccggcatcagtgagatgaaaattgccacaaagaacggaaccagacttttcatcacattctccagacgctgctttgccaacgagcatcccacgaacaggacgttgccaacgggaggagtgatggtgccgccgatctcggaatcgctcgcctgaccgtgcgccagccggagctggatcttgtcactgccaatgctgccgtttaccttgaaaaagggggaaactccgattcccagcagcacgacgacaatgacggtcaacaagatttttgatgtctttttcagtgtcattcctcctaaatgatttgctcgttcggtgcgacttcctgattataattatacagcctttggggcccgctttctcgcaaagaattgcgaatgaagcccaaaattcaaacgatattgcgcttgtgttgtatacattcttgcgcttttctctattgttttgttgaaatggacaatatttcttgccattcttctacatacaaataattttttagatcaattcgtccgttttttctgcgcaatattgtttgagcgcaaacagaaaagagccacccgtagtttgttacggatggctcttgacatgtttcttttataaaaggctgccgctcagttcagccggaacacctgctccagcttgggctgtgcgccggtcacggggtccatttccagttctagaatgtccttcatgtacgcgttccaacggtctaccaccgggctttctgcctgcaccttctcggcataggcaacgcccttttcgcactcgtaatagccgaacagttcatcgttgcagtaaaagatgctgtaattgcagatgccggcgtctttcagaactttaaccatctccggccagatctccgcgtgacgtttctggtattcagccttgcagccgggcttgatgcggcctttccatgccatgtgctccatgttctgctccttagttgagaaacttctcgttcagggtcacaccaaagtcgcgggcgatggcgcgcaggtcgtcgtcggtgatggtctgacggatgatgccgccgcccatggagagcaccttgacgtaaatttcggcactcttttcgatggtgtgggccagaccaaaggtgatgtcaaagtccgggccggaggcaaacagaccgtgctgtgcccagatggccgcctgataagtcttcatcagctcgctggtggccatggcgatatctgccccgccgggcaccatccacgggcagacacccacgccctccgggaacaccaccgggcactcggtggcgctctgccacagcgcacgggtgaagtcccggtcggtcaggggcaggatgtaggtcagggcgatcacgttggtggcgtggcagtggtagataacacggtttgcgccattggtagctgctttgcggacgctgtggttcatgaagtggctggggaactcactggtgggctttgcgccgtcctccagaccccagacgatgcgccagctgtcgcccttgtcgttgatctccacaataccgatgctgtggacagggtccgactccacgttgcggaaaaacttgccggagccggtggtgatgaaatactcacccgccagattatcggcctgcacgcccatgttcacccactcccggggctgctcgtcaaagaaggggcggcactgcgccacttcctcttccttcatgcggtaggtcaggttgccgccgttgcgctcgtgccagccctgcagccagccatcgttgcacatccgcataaagccttttacgatctcaatatccagaatacccatcttcaaaaacctctctcattcaaatgcgcttgctcagcacgttctgctcgtatttctttacttcctcaaaccatgcgccgtccaccggcacaccgttccggcggcagtattcgtcccagacttccccaaaaggcagggtcttcagctcctcttgccgcaccatcagctcggtgaactggttggtgtcctgcagctccttcagtaccgtatgcggggtgcacagggcagacagcagcgccttttccacgttgcggaaacccaccgtccatgcggagatgcggttgatggaagcatcaaagtaatccagtgcaatgttcacccggccgtccagaccgccgcagcgcacgatctccttgcagatctccttcgtttcatcgtcaaacagtaccacatggtcggagtcccagcggatggggcgggtgatgtggagggcaatctccgggaagaaggccagcagggcggggatcttatcgctgaccacctcggtgggatggtagtggccgttatccatcagcggaatgcacttttcccggttgaaggcggcgtagctcagggcaaactcggcgctgcccacggtgtacgcctccgcaccgatgccgaacaccttgctctcgatgcagggcttcaccagcttgaagtcgtaaggctcgctcaaaatttcgtcgatgctggccttgtagcggtcgcgggggcctttgcggtccgccggcacgtccttgaagccgtcgcccgtccagatgttcatggtgcagggctgccccagctcctcggccagatactgactgatgcggatgcaggccttgccgtgttccacccaaaatttccgggtctcctcgttggggctggcaagggtcagcgggtcgcacttggagtgggagaaaaaggtggggttgaagtctgcacccagccctcttgccttgcaaaaatctacccattttttaaagtgcttcggctccagtttgtcccggtctacccacgggttctcctcgtcaaaaatggcataggaggcatggaggttgatttttttggtgccggggcagagggacagcaccttgtccatatctgccatcagttcctccggggtgcgggcacggccggggtagttgccggtggtttggatgccgccggtcaggggcttggtggggtcggtatcaaagccacggacgtcatctccctgccagcagtgcagggagataggcacggtctttaaccgggcaatggcagcttcggtgtccacgccaatggcagcgtagcgggcttttgcttctgcgtaactcatacggttcctcctttagaaatactcatctggatcttcaaattgccgatggcggtggcctcgatgggcagcgccaccacctgttttccggtatagtgagcggtcagctcgttcagggtagcgttctttgcgccgccgcctgcgatgtagagtttatcccagtgctggccggtgagggcttccagctcccggaaagcttccccgtagcagtacgccagcgaatggtagatgctgttgatgaggtcggcatccgtggcagggacttcaccggtctcggcaagggcggctctgatttccgcgcgcatatccagcggggcagagaagcgggctgcgtttacatcaaaaatgcgggtataggtgctggtcttggccagctccaccatctcggcaaaggagatgcccagctgtttttgcacacactggatgatccacagacccatgatgtttttcaggtagcggatgtagcccacgccgccctcgttggtaaagtttgcgcggcagctttccgggttggtgatgggctttgccagcttgacccccagcagactccatgtaccggaggacaaaaacggcgcatcgccctgctccatggggatgccctccacggcgctggcggtgtcgtgggtggcgcacagcaccaccttggtctgcccgcccacctcggcggcaatgtccgccttcaacgggcccagcaccgtaccgggagccgtcagcttggggaacatcgtttccggcaggccaagcgcctgcaaaatttccgggtcatattccccggtctgagcattcacaaggccggtggaggtggcattggtgtactcgcgggctttcacgccgcacagtttccacagcagatattccgggatcatcaaaaagtcctcggcctctgccagccgtccggcttttttgtcagcgtacagctgataaatgctgttgaagggctggaactggatgccggtgcgctggtaaagctgttcaaagggcaggatgctgtgtacttcgggaatgaccgcctgcgtccggctgtcgcggtaagtgtagaccggataaatcggctgatcgtttttcagcagcacataatcaacggcccatgtatcaatggaaaggctctcgatattcggatattttgcaaaggcttcccggatgccctgcttcacgttggcaaacaggctgtcgatgtcccattccagatgaccgtccacccgctggacgctattgggaaaacggtacacttcctcggtgcggagaacaccgttctccatccatcctacaatgtgccgcccgctggacgcaccaatgtcgatggcaagatagtttttgtgcataatgcgcctcctgtgtggctttgactgctaccagtatagcggtataatgcgggcaattccatccgcaaaggtgacgcattctttgtgaaaagtctactcttgcaatgcaaaggctggtgcgctatactgaacacagaaagagaggaattggaaaatgctgacttataacatggatgtgaccccggagagcatctggaaacgcacaacgcccagcgaagcagagatggcccagccttattattgcactgaagcgggggtgttctatgcccagcagcatttttctacggcgcgcacggacaaggaaagctacattttgttctataccctgcgcggtgccgggctgatcgagcaggacggaaaccatgtcacgctcagcaccggacaagcattgctgctcaactgccgtactccgcaaagctactgcactgcaccgggacaaagctgctggcaccattattgggtgcatctggacggtgtgggcgttgcggccatggaaccgctgctgtttccgggcaaaaagttgaccccggtgcagcttaccggggtcaagatgcaggaatattttgaaacgcttttagcgcagatggagcacagcaccgtggacagcatggtgaccaccgggctggcgctgcacgagatgctggcgctgtgcgcccggagcattcttgcagaagctgaaaccaccagcacacggcaggtcattttgcaggcggcggagaccctcgacaaccagcgtgaagaatctatcgaaggccagatccgggagtgcacggcctatgcggaaaagaatggcatcaccatcgtcaagcactatattgaccgtgccatctctgccaagacggacaaccgcccggagtttcagcagatgataaaagacagcgacaagaagctgtttgacattgtgctggtctggaagctcgaccgctttgcccggaatcgttatgatagtgcccggtacaagacccagctgaagaagaatggtgtcaagctcatgtctgccaccgagatcatctccgaggggccggaaggcatcattctggaatcggtgctggaaggttatgccgagtattattccgctgacctgtctgaaaaggtcattcgtggcatgaccgaaaacgcactgaagggaaagttcactggcggtgccattccctttggctacatcatcaacgcagaccaccgctttgaaatcgacccgttgactgctccctttgtggcagaaaccttccagcggtacaacgatggccagaccatgcgggaaattcgggattggctgaacgaaaagggcgtcaagaaccagcgtggcgggctgatgaccttcaacaccattcagcatatgctgaacaatcgccgctacatcagggagctgaaatatcgtaatgttttgattcccgatgcgattctctccattgtgtccgcagagcttttcaacgatgtacaggaaaagatgttgaaaaacaagaaagcccctgcccgtagaaaggcagaggatgactccctgctcaccaccaagctgttctgcggctactgtggtgcactgatgtttggcgaaagcggtacgagccggacgggcgaagtccaccgctattataaatgtgctactgccaaaaagcacaagggctgcaagaaaaagactgtccgtaaacagtggctggaagatcttgtggtcaaccagaccatgcaacttgtgaaagacgatgccgctatggagtccatcattgccaaggtgatggaactgcaaaacaaggagaacaccaacattcctctttatgaaaagcagctccgggatgcggaatcgggtatccagaatatgctgaatgcgattcaggccggtatcctgaccagctccaccaaggagcggttggagcagctcgaagaaaccaagcgtgagcttgaagcccgcattgcagaagaaaagctggcaaagcccaaggtcacagaggagttcattcgcttttggctgcggcggttccgcaagctggacatgagcctgaaagaccagcggcaggcactggtggatacgttcatcaatgcgatttacctgtatgatgataaggttctcattaccttcaactataaagaaggaacacagaccgtgacctttggagaagcgacagaagttgcatccgagggaaatggttcggatttggattgcattcctgcaccacaaaaaagacagctatcaaaagctgtcttttttgttttacatgactatttccctttggctgcaacggcggataacaggacttgaacagcactgcaacgccgcaggcggggcaacgtgtaggaatgtctaccaggaggactgccactgaaatagaaaatccgaaccttttctcgataggagaagggttcggattttttggtttattggttcttggatcgtgccggaatttacggctcaggcaaggctttcaatttttcgagccataaaggctccgaaaaagattccggggcttgtatatttttcagagagctattttgcaacagtccggaacggatttactttccaagtacaacggaaagtccgatctccttttccgtctcgctcaggtcaagagcgccgccatcggcgacggtcacgtgcagctcatagagcgtaccggcggtaagttccgttacagccttgccgtcctcgtctgtgatcgaccacagtgcaggatcgacctttgctagcttgccgtccacgccataggcgtagagggtcagaccggaggtgctgccggacaggttattcatgcggaaagctaccgtggtgttgggatgtacgttgcggacggtcacagtgttgcgccagcttgcaacggtgccttcgccgccgtcctgcgcaaaccgctcctgcgaaaggacgtttcttgctgcctgatcaagatcgaccttgcggtagggcatttcgggcagataaacgaaacggtcctgcaaacgaagcagttccagatagcctgtcgggcagtagagcgcattgccgctgttgccggcatacattccaatggccatgttgttatagccgtacttgttggaaacatccatcgtgaaaacagtctcgccagtttcaaaatccagaatgatgtactgccacatcccggtggtcacatcctgcacatagccgtagatatagcccgttgcggtggagagtttcaggatggaggtgtcgctcaggtcgttccggcaccagacgctcttcatctcgtagccgtttgcggtctttacggtgtccacacgctcgatgccgggggcgatcatgatgttgcccttcatgagccagttctggtcgtaaatattggcgtagctctggatggaggagtcgttgttgggatcagccagacctgcattgcccgcaccgaaccagttgcagacgatggtgctgacggtgccctcgccgtcgtcatagacgatggcagagttctcaacggctacctgatagccctcgggcaggtcatccagcaccggggtgcttgccacgacctcgccggtcttcatatcgagcgcaagaaggtttacagggtcctgattatccgtgaacagcacaaggttcggtgtcagcgtgggcgagcaaccgccgccccacgcaagaccgccgccggtggtcttatcgccttcgccgctcacctttgcacccgcgctctcatagggcgtgcaccatacaacgtctacgccttcttctgcgcgcagaagatagcagttctggttggtcaggaccaccgcaccgtccttggaggcggcgatgccgttttcagcgccctcgccgggggtcagttcgtggacaaaaacagcctttgaaaggtctgtctgctcgccgttcaggatcgcatcaatggccgagcgggcaatatagccgatgacgccctgctgctggcgctgcggataaatgcggaagcctcccgttgcaaaccagaggtttccgtcatagtcaaagaccacggacagaagattctgcgtcagttcttttccaagcgcggcctcggctgcagctttgatatcaatgtccagcaccttttcaaattccggcagaacattgccgttttcatccgttgcgcggagcatcagcacatggttgttgctcgtggggcagacgatgcggttggattcgtcaaggaaggtataggagctctggataacgtaaccgccgccgtcatgcttctttggcgagaaatagccgagcgtttttgtttcttcggcgttcaggtctcggatggcgatgccgcccagcagcggcacaacggcatgaccgtagctgtcaaagtagatggcgggcgaagcgttcgcgttcgtcgtctcataggaaacgttgatctccggatagatggcaagcggcaggatctcatccgtcgagtcggtgttgtagccatcgtgatgaatgtttgcatcgctcttggccatgtaagggttttcctctacctgcttggggttcagagcctttaccggcagcgccgcagaggcttgttccgctgaagaggcctgtaccgcagcggacggggctgcgggctgcgaagcggcagcactgtctgccggcgtctgtgttccgccgcaggcagccatggaaaggcacaatgctgcggtcagcgacaggcttaacgcagaatggacgatgtttctctttttcataaaccgttctccttgttgtgtttgttgcggtcagaccagtgctgctccgcctgatttttttccatccagccagatgcggaatccctgccgcaaggcggcttcggtcaccggctccagcagaaaatagtctgcacgcaaccggaaggcatggagcgaaaaatccagatcgctgcaccagataatgcgtgtctgtggacaaagcgcgcgcagatgctctactgcattcaatccgtcgacccccggcagggcaatcacggcatttgtcagcggctcgttgcgtgcagcctcaaaaaagctttcctgatcgtggtaacagtccattttcgggaacaagcaatgttcggcgcagaaccgcgagatctgctctgccagaaaagcttcctgcgccctgctgcttgtcagcacggcaattcggtacacagcgtgcctcctttctcttgcgccatcgttggcgttctctgctttcagtatacggacaggcatggtcttttcaagccatttagcacgaaagccccttttccgtcacgaaatcccattttcggctgcgacataaccggacaactgtgctataatcaggatgaaagagtttataaaggaggttggaagctgtaaaacggcttcctgatacagcatgaggatcgcaatcgtcgatgaccttgatactgagcgcacactgctgaaggagcgcttggcacggcagctgcgccagcgcggtacagaagcagagcttttagaatttgacagcggagaagcttttctggcggcagaagaagcgcagcgctttaccgccgcatttctggatatttacatgaatggtttaagcggcatggatgcggcaagggaacttcggaaaaccgatgcagactgccttctggtttttaccaccacctcgacagaccacgcactcgagggctttcaggtgcgggcatttcattatctggtcaagcccttttctgaagccgagctgtccggtctgttggatgaaatgctcgcaaaactcccccgcccggagccggttttgacggtgaaggtggatggcagcgacatccatttgcgctatcgtgatatcatatccgccgagcatttcgcccacatcatcaatatccgcaccactgccggcaaaacgcttgctacgcgccagagtttcaaggcgttcaccgagccgctcaaaaaggacccgcgcttttttgtctgcggacgtggcgcgatcatcaatatggagaatgctgccgattttcaggctgccgccttctgtatgacggacggcagccgcgtctatgtcagtcaggagcttttgaaagctgcccggcaggcctttatggaatttctgctgcaaagggggcgtgcggattgaaggacgttctgcgcccggttctggaacttacggtcgtgtttcccggtttgctgcttgcgtattttccggtaggttcctatctgaagctgccgcccgcaaagcttgcagcaggggcggtgccgctgctgctcgggctttgccttggcggcgggctgctttgctatcattttggcatttcaacggcgttctccgtgctgcttattacgcttacagcaatttttttgtatcgcagaacgctgcggatctctctctggaaatccggaaccatcgcgcttgcggtctgcgcggtatttgcttgcctgaacagcctgtcccgggccgtcggcacggcaatcgtgatccggatgcagctgccgccggacaagccgtggttctgctttggcgcctgcatcttttataatgcggtctgctggctgatcactgccgcagcctattatcccgccacccacgcagtacgcgcgatggtggaggatgacaattttgcgcagacgtggtatgtgttctgggtactgccgctggtgttcatcctgctgaacctttttataaccccgcgctaccagataacgctccggacagggcgggtcttgcaggtctacatcgttatgagcatcgcgcttttgtttctgatgttcatgttcaatgcaatctttctgctgatggcaaacagccttaaccggaatgcaaggttgcagcaggaaaatcagtttctttccatgcagcagcagcgctatgaaagcctgaaaaccgccattgatgaagcccggcaggcgcggcacgatatgcgccaccagctgaatcagatctccgcactggccgaggcaggagatctggataacctgaaggcttaccttgcaaaaacggtctcccggatcccggatctggatatgaatttctgcgaaaaccgtgcagcggacagtgttgtcggccattattgcgcccttgcaaagcgtgagggcattcccttttgtgcccggctcaacttaccgcagacgctccctgtggatgagatggatctgtgtctggtgctgtctaatcttctggaaaatgcatttgaagccagccttcgcactgcacccgcccggcggaagatcgagatcaccgcgtatgtccatgccgagcggcttcttctggtcgaagtggaaaacacatttgacggcgcagttcacgaaaaaagcgggatgttccgctcttccaagcgaaggggaaacgggatcggcatccagtctgtccgccatattgcagaaaagaccggcggggcaagcacgtttacctatcagaacggcattttctcagccaaagttatgctctgcggataaggagccttttgctttggcggagatttttacaaaaaattcacgcgggcagggttgccgccgcataccggatgtgctatgatgaagtgcaaaatttgaagcggagcgatgggttttgatttgtcaagctcgcggaatcaggaggaactacccatgcagaagaattatgtacaggaaattctgagcatcattcacagcggtctgcccaaggcggaactggctgaaaaactgtctgattaccatgaaaaagatctggcggatgcgttggaggtgctgacccccgccgaacgccagtcgctctattccattctgggtgtggataccgttgccgagatctttacctatctggacgatgccgagccgtacctgaaggagctgcccagccacgaggccgccaaggtcatttccaacatggactcggacgatgcggtggacgcactggaggatcttgacgataccgataaaaacgagatcgtcaacaagctggacaaggactcggtgaaagatgtgaagatgctgctctcctatgacgaggacgagatcggcagcagaatgaccaccaactacatctccatcaaaaacgatatgaccatccggcaggcgatgagcgagctggtaaaacaggccggagaaaacgacaacatctccaccctgtatgtggtggatgaaaacgagcacttctatggtgccatcgacctgaaagacctcatcattgcccgggcagaggaaagcttggaaagcctgatcgtccgctcctatccctatgtcaccgaccgggagcaggtcagcgactgtatcgaccgtatcgtggactacgcggagcgcagcctgcccgtgctgaacgatgccggcaagctggtgggcatcatcacctcgtccgatgtggtcgagctggtcgatgatgagatgggcgatgattacgcaaagctgggcggtctgaccggcgaggaggatctgaacgaaaacgtatttgaaagcgtgaaaaagcgtctcccgtggctgatcgcgctgctgttcctcgggatgctggtctcctcggtcgtcggcgcgtttgaatcggtggtagcggtgctgccggtggtcatctgcttccagtccatggtgctggatatggccggtaacgtcggtacccagtcgctggcggtgaccatccgtgtgctggtggacgaaaacctgaccctttccaaaaagctgcagctgctctggaaggaaacccgcgtgggtcttttgaacggtgccattctggccgtgatggccttgggctttctgggctgctacatccactttttcaagggctatgtctggacctcggcctttttgctgtccggctgcgtcgggctgtcgctgatcgtgtccatggtcatttccagtctggtgggcacgctgatcccgatgctgttccacaagatccatatcgacccggcggttgcttccggcccgctgattaccacgatcaacgatctggtggccgttgtggtctactatggccttgccatggtcgtgctgatcgatctgttccaccttgcataacgggtgcatcaaaaagggcgatccctccggggaacgcccttttttgttgcgcaaacttttgctaaaaatgttaatgcgtcctaacatcgtcagaaaatgttgaaaaagcccgaaagcgtgctacaatataaagataaagagcccgccccgctccgggcgcgggtacacagatgggaaatacagaaacgaggggtaaatatgtttgatacaaaaaagcttgcactgtttttgggcggtgtggtgttcggctctgccggtttcaaggtgctgtccagcaaggacgccaaaaaggtctacacccagacaaccgctgcggtgctgcggatgaaggactgcaccatgcagaccgtgaataaggtgcaggaggaagcaggggacatccttgccgatgcaaaggccatcaacgagagccgcgccgccgaggctgcacaggaggtcatcgaggatacggctgaagaagagcagcccgcagagcagactgcacagtgatatagcgcagcggagccgcccttgggcggctcttttttacacagaggggtaagaagaacaatgaaatgtacgatcttacatgaaggtaagggacggatgcgggtgcacgtctgcgccgtgcgcatgacgctgcaccgggcagatgtgctggaagcctacctgaacgggcaggataacatccagaaagccaccgtctacgagcgcaccggagatgtggtgctgacctaccggggcagccggaaggacgccgccgccctgctggcggcctaccgctttgacaacgaagaattagaggtgctggtcacctcccacgacagccggaagatcaatcaggaatatcaggaaaagatggtcagccttgtggcaggccggatgttccgcaaggtgtttctgcccgcgcccatcgcggcggcctatacggtgtggcgctccatcgcctttatctggaagggaatccgctgcctgctgcaccgcaagctggaagtagaggtgctggatgcgctcagcatcaccgcctccctcctgcggggggattacagcaccgcaggctcggtgatgttcctgctgacggtgagcagcctgctggaagagtggacaaggaaaaagagcctggacgaccttgcccgcagtatggcactgaacgtggataaggtctgggtgcgcaccccgcagggcgaggtgctggtaccgttgacccgcgttcacgccggggacgaagtagtggtgcgctccggcaatatgatcccgctggacggcatggtgctggagggcgaggccatggtgaaccaagccgccttgaccggcgagtctatgccggtacgcaagaccaccggtgccaccgtctacgccggaaccgtggtggaagagggcgagtgcgtccttgtagccaaggcagagggcggcgccaaccgctacgataagatcgtggcgatgatcgaggaatcggaaaagctcaagtccggtaccgagaaccgggctttgcagctggccgaccgtctggtgccgtggtgccttgccggtacggtggctacctacgcctttacccgcaacgtcacccgcgccatctccattttgatggtggatttctcctgtgcgctgaagctttccatgccgctggcggtgctctctgccatgagggagtgtggggaataccacatcaccgtaaagggcggcaagtatctggaagcgctggcaaaggcggacaccatcgtgttcgataagaccggcaccctcacccacgccaccccgcaggtggtgcaggtggtgcccttctccggctgcggggagcaggaggtattgcagcttgctgcctgtctggaagagcatttcccccattccatggcaaacgctgtcgtccgcgccgccagggagcggggcatctcccacgaagagatgcactccgaggtggagtatatcgtggcgcacggcattgccagccgggtgggcggcacgcgggtggtcattggcagcgcccacttcatttttgaggacgagggctgcaccatcccggcaggggaacaggcaaagttcgatgcgctggacccccagtattcccacctgtatctggcagcttccggggtgctggcgggggtcatctgcatcgcagaccccctgcgcccggaggcggcacaggtgctgcataagcttcggagactgggcatcacccagaccgtcatgatgaccggcgacagtgaccgcaccgcccgcgccattgcggcgcaggtgggggtggaccgctgctttgcagaggtgctgccggaggataaagctgcctttgtccgtgacgccaaagccgaaggacatacggtggtgatgatcggcgacggcatcaacgattcgcccgctttgtcggcggcagatatcggtatcgctatccattccggtgccgccatcgcccgggagatcgccgatgtgaccatccgcgcagacagtctggaagagctggtgaccctgaaagccattgccaacgccctgcaaaagcgggtgggcagcaattaccgctttgtcctcagcttcaactctgcgctcatccttctgggcgcactgggcatcctgcccccggctaccagcgcaatgctgcataacctttccacccttggcatcagcctgcgcagcatgacagacctgctggagcagaagcctttaccgtgaaaatggaacgccggagcgtccgcagacgctccggcgtttcgaaatgatagatttcccagccaaaagggaggcgctgcacgatattgtgcggcggcctcccttttttgtttcagataaaccggcagaagcccagccagcagcccagcaggaagaagagcagcgccttgcccagcaccggcagccacgggcgcttgcaaagagccaaatcccaccggtggatgttctgcttggggcaggtgcccacgcaggcttcacaggcgatgcactccccgctgcgcaggctgctttcctccagcttcaggcacaccgggcactgctgcttgcaggcattgcagcccgggacgcagccctcgctctgccggtgcagccgtgcaaagggcagcaccggcagcagggcgaacaccgtacccatggggcagaggaactgacaaaagaaccggggctgcaccgccatacccagcaaaatgagcacaagcagcgcgatgcctacgccgaagccctccggcggcagacgcagagccgtcaggcgggaaaacacctcccacgggcttgcgccggtcagcagcttttcctgccgggtcacatacagcgccaccagccctgccagcagcagatatttgaacttctgtccccaaagtaccgcccgctccggcagacggagcggctttttgcagtggaacagttttttctggacaagcccggacagtgcccagatggcatcgcccaagctgccaaaggcgcaggcgtacccgcagaaaaaccggtcgaacagcaacgtgaagccgcacagccccagcagggaaagcgtgaagctgtccgccgagagcacctcgcccgcaccgatgtgcaggaagatctgctttaccccggaaaacccggccacgaatgcgcccggcatggacacaaagaagaacagctgcaccccggcgcgcagccatgtacggcgctttttgtcccgctgacgctgctgcgccgccgtcaaaggctttgcttgtgttttttccatcatcctgccgcctttcccagtgcgtcctctactgcaccgataagaccttctgccgtaagggtagcgccggaaacggtatccacctcggcagactgcactgccagcatctcgtccagcaaaggcagcgcctgtttatagtagggcttgtcctcaccggaagcgtccagcaccgcaatatcggtcatttttccgctttggatggttaccgacacccggatgacatcgccaaaaccaaaggcgctgccctcataggtgccgtcccggtagccgctctggctctgctctgcctgcgctgcgctctgcgcctgcaaaacggaagcgttgtaggcttccacttcggcaatctcctgcttgcgctggcttaccgccgcagcccggaccagcgccacctgctggtattgccacagtacccccaaaatcagcagcagattcaccgcccggaggagaaaattcttgtatttcattccgctgctccttccgtttcaggttcggtttcggtctcttcgggcggcagcgccgcctcggatgccggcagcacctccgcagaagatgccggttccggttcagaatcgtccggtgtttctgccgggaaaagctgctgccacacttccttgaaccacgcggaaacagcgctcttttcctccggctgcaccacctccacggtgggcgcggtgaccggtgtttcctcgggttctgccgcttcggacggcgcggcttcttccaccacctcttccgaggctgcctgctccgggtcggcttcctctgccggggcgatagcggcctttgccaatgccagcttgacggcgttcaggatgccggtggaggagtaggtcgcaccggaaacggcatccacgttgggactttgtccttccagaatggcggggatgacccgctttgcccgggagagatattcctcctcgtcctcggcgctcagaaccgtgatatcggtgatcttatcctctgccaccgtgacctgcactgtaattttgccctcaaagcctatggcttcggcagtgtagatgccgtcaaggtaggtggagggtgctgtaaattcctccaccaccagcggtgcggcaggcttcggctgcggcggcaggggattattcaccacctcgccggtcagggcgttctgcaccgcgcccagaatgccccggctggtgtaggtggcttcggaaacagcatccacctcccagctctgggcatccactacggtggtcaaaagccgcttggcgcgccgcagaaactgctttgtctcgtgggaagcgtccaggacctccacctccgtgatgctgccgttttccatggtcacctgcacccggacggcaccgccgtagccccgggaagagccgacgtatacgccgttggcatagggcagcttgggcagggcttcttcctccgcttcaacggaagcggcttccgccggctgctccaccacggctgtcagtttttccggcacggcagccagcaccggcacggtgcggggcagggcaaaaagcacggctgccgctgccgccaccgccgggagcagctgcaccagcggcagcagtgtgttgcatcgttttttgttcattccaactcctcctgacacggaaaagcaaggccgcctgcataaagcgaccttgcttttttggtgttctgtttttgccggatcaggcagctttcaggttctgcacggcatcggtcaggtgggtcacctgctccagtgcagcggccttatacagggtctcgcggctcagcagttccacgctctcggccaactcggtctccagattggcatagctgtcggcggtgtaagcggcctttgccttgctctgtgcttcggcgaccacagcctgcagggcggcgcggtcggcatcgcttgccagctcgtgcttggcaaggttctcggcagtagtctggaacttgaccaccgtgtcggcgtagcccagtgcgcggatggtgatggtccagtagccggtgccgtcagtgccctccggcagctggcagcgggcggaatcgctcagacccaactggatgcccatggacttgtgcatccagttgtcggctgcaaacttggtgccgtaggaggccttggcgtgggtgtaggtgctgtcgttgccgtagtaggtccacaccacagactgcatccgggagcccagctcgccgtagttgccgttcagatccacacggataaactcgccaaagctgcccacgtcgctgccgctgcgcagattcacggtaaggccctcggcagccttctgggcggcttctgccacgccggagccggtgccgttgtgtgcagcggagaaggtgtagccgtcgccgtttttagttgcgtacttcaggccgttggtgtttttgtccaccgcagcggtcagggcgtaggcggtcaggttcttttcagagtagccgcccgccagctggccgccgttttccaccacggtgtacttggagcagaaatctgcaaggtcgctggtggctacgcgcacaggcacatacttggtgcccagcacctcgtagtggtccatctgcacggtggagccgtcggccttggtaatggtgccgcggttccagcccacggtggtgccatcggccagatagatggtcttgccatcgtccgaccagtgggaaacggtgtaggtgctgccgtccttggcgtagatcacggcagtgctctggaagctgccgcggtgcagaccatggttgacggttgcgcgggagaccgcgtcaaacgcgccaaggtcctgctcttcgtggctgtccagctgtgcagaggaggcagtgctcccggcagcatagaccttctcgtttgcccagtactcgtcccaggtcagggcagcgtagaggtaggtatattttttgcccagcagaaaatcgaaaaagccgttttcctcctcggcgggggctgctgcaaaggcagtggcggtcagcaggctgaacgccatagccgccgacagcagcagggaaagaaattttttggttctcatgaaaaaatgctcctttcatcacactggcagggaatagaaatcatgtagttagcattacctaacattgcgcgcaaagaaaaacctgcggggcaaagcccctcagatggttagggtaagctaattgacggaaattaagataacacgcatacaaagggatgtcaagaaaaagcagggatgtttattcaaacaaactttttggggcgggacagggaaaagcagttgcggcacgtcatcttgtagagcagtgcttttgcggcttgtactctgcccccctgcgggcggctgtgggcaaaagaaaaagcgacgacccgtgcaggtgggtcatcgcttttctcgtcccttgcgggacaggcagggtaaatgataagaaggtaaatgaagaaaatagcaaggtaaaaacaaaggcgcatacggagccgaagttgccgctccaaagagaagatgtatccaagcttcgcttttgttggatacaacataccactttggaacagaaattgcaagaggttttttaaaatttctccccaaaaatacgcgggaaatcgcatttttgtagaaacgcacaaattttatagaaagttcccggcaaactgacgaacaagcataaaacggaatggcagtcggaaaaccgcacagggacacctttataaaaccggcaggcaatggaatcaacttttgcagcctgtccggagcaaaagccttcaccctttgggggaagcctttattcggaaagcggtttttcgcgggatgtagcctgcaccgctttacaagcagccggtggtgtgttaagatggacacatctgctgcaaccggaagaatgcacgcgccgggcagcggtggcgtaccgggaaaagcgcccggtgccgagaggggagaaacgaatgacaaagctactgcatggcaatgaaaaaagcagcctgaccggcgggcgggagccgctgttcagccagaaggaactgctggtactggccattccgctgctggtggagcagctgctggaagtgacggtgggcatggccgacaccatgatggtgtcccgctgcggcgaggcggccatctccggcgtcagtctggtggatatgatcaataaccttatcatcgtgctgtttgcggcgctggctaccggcggcgcggtggtggtaagccagtatctgggcgcaaaagagcgcgggaatgccgacaaaagcgccggtcagctgctgctgctcagcggcttgtccggtgtggtgatcggcgcggtatgctttgtgctggcccgccctatgatccggctgttctacggctctattgataccgacgtgctggacgcgggcgtgaagtatttgcagatcatcgccctcagctacccgtttctggcgctgtacaacggcggtgcggcactgttccgcagcatcggcaactccaagatctccatgcagatcagctttctgatgaacatcatcaacatcgtgggcaacgcggtgtgcatcttcggcttcaaaatgggcgtggatggcgtagcatggcccagcgtggtgtcccgcgtggtggctgcggcgctgatcctgcgcaagtgctaccgggaggatgcggtgcttaccgtgcccaagaccctgcggctggacggcggcatggcaaagcgcattctgggcatcggtatcccctcggcctttgaaaacagcctgttcgaggccgggcgcattctggtggtgagcatgatctccaccttcggcacggtgcagatcgcagccaacgccgtggccaacaatctggacggcatgggcgtcatcccgggcaaggccatcagtcttgccatgatcacggtggtggggcgctgcatcggtgccggcgaccacgagcagaccgtttactacacccgcaagctgctgctgtgggcttacattaccatggggctttccaacggagcgatcctgctgttcctccggcagttggtgggcatctacgccctttccggcgagacgatggagctggccatcacgctggtcaccatccatgcgggctgcgccatcatcttctggccgctgtccttcgtactgcccaacgccctgcgcgcggccaacgacgtgaagttcaccatggtggtgtctatcctcagcatggcctgctggcggctgggcttcagctatctgctgtgcgtccgcatgggctggggcgctgtgggtgtgtgggtggctatggtcatcgactggacctgccgcgtgacctgctttgtgctgcgcttccgcagcggcgcatggaaaacaaaatatcaggcataacaataaggagaaaagcatgaaactgatcagctggaacgtgaacggcctgcgcgcctgcctgacccacggctttgccgagagctttgccgcgctggacgcggacatcttctcggtgcaggagaccaagatgcagccgggacaggcagattttgcgccggagggctacaccgaatacacctactctgccgagaaaaagggctattccggcacagcctgctggtgcaaaacggcaccgctggcagtgaccaccggcgtcgggctggaacagcacgaccacgagggacgggtgctgacgctggaataccccggcttttatctggtaaactgctacacccccaacagtcaggacgggctgaagcggctggactaccgcatggagtgggaggacgccttccgggcgtacctgctggcactggacgcaaaaaagccggtgatcctgtgcggcgatctgaacgtggcgcacaccgagatggatatcaaaaacgccaagaccaaccgcatgagcgcaggctttaccgatcaggagcgcgccaaaatgaccgagctgctggcggcaggttttgcggacagcttccgggtggtgcacccggacgaggtgaagtacagctggtggagctaccgcttccacgcgcgggaaaagaacgcgggctggcgcatcgactattttatcgtttcccggcgcattgcagaccgcatccgcgccgccgagatccacaacgagatcttcggctccgaccattgcccggtggagctgcagatcgacctgtaatataaggagaagccaatgctgaaaaattatcttctgatcttccttatctccatggtgcccatcatcgagctgcgcggagccatccccatcgggctgggcatggggctgccggtgctgcccacctaccttttgtgcgtgctgggcaacatgatcccggtgcccttcatctacctgttcgcccgcaagttcctcatctggggctaccacaagcccctcatcggccccatctgccgcttttgcatcaacaagggcgaaaagggcggccgcgcactggaggccaaggccggcaagggcatgaccgtggcactgctgctgttcgtgggcatcccgctgccgggcaccggcgcgtggacgggcacgctggcagcctccattctggatatgaagttcaaggacgtgttgatcgcctgtatgggcggtgtgctgctggcgggcatcatcatgggcttggcaagcgccgggctgctgggtgcgctcagcgggctgtttgcggcaggctgacaaaacgcggacgcttttgtcgtgaaaaatgccggtagcttttccgcccggagtgtgttaaactgggtaacagttgtgaaaaccgggatctgctcccggtcagaaaggacgttatagaacatggatcaggcactgaatcagaaaattgacgcatacattgcggaaaacaaggagcagctgctgcaggacattgcagcgctggtcgccatcgacagcgtagagggcaccccggaggagggcgcacccttcggcgcaggccctcgggccgcgctggacaagacgctggaactggcagcaggcatgggctttgccacccgcaactgcgaaaactacatcggctatgccgagctggccggtgcggacccggaaaaatatctggccaccatctgccatgtggacgttgtgcccgtgggcaacggctggacggcagacccctttaagatgcgcattcaggacggctggctgctgggccgcggcgtctcggacgataagggcccgatgatcgttactctgtacgcgctgaagttcctcaaggagcagggctaccagctgcgctaccccatccgtgccattgtgggcgacaacgaggagacccacatgaacgatgtgaagtactatctggaaaactaccccgctccggtgttctgctttaccccggatgccgagttcccggtgtgcaacggcgaaaagggccacttcggcggcaagatcgtcagcccggtgtgcaacggtgtcattgcagagtttgagggcggtgttgccaacaacgcggtgccggatcgcgccagcgcactggtcaagaccgatatccgcaagctgaagaacgcccccaacatcacgctggaaccggaaggggacggcgtgcgggtgcgcggctggggcaagtccggccacgccgctatgccggagggcacggtgaacgccatcggtctggtggtggattatctgctggataacggcctgtgcaacgatgccgagcgcgcttatctggaagcactgcgcaaactgcacagctccaccgcaggcaccggccttggcatcgactgcgccgacggccccttcggcccgctgaccatcatcggcggccgcatctatatggaggacggcaagctggtgcagaccatcgacagccgcttccccacctgcaccaacagtgaaaagctgaccgcacaaatcaccgctgcgctgggcgagggcgcaaagctggaggatgtggatgctgccgagccgttctacatcgaggccgacagccccgccatccgcgcctgcatcgacacctacaacgaggtgaccggcgagaatgccacccccttcaccatgggcggcggcacctatgcccgccacttcccctatgccgtcagcttcggcccggagcatgaggatgtgaagctgccggagttcggcggcccgatgcacggtgccaacgaggctgcccccatcgacaagctgctggaggctgtcaagatctacattctggcgctgctgcggctggaagagatcgacttctgaggtacagcatgaacgtgcttgtcattgacgggcagggcgggggactgggccgccagctggtggctgccctcagctcccagtgcccggacgtccggcttgtggccgtgggcaccaacagtgtcgccgcgcaggccatgcacaaggccggggcgcagcgcgccgccaccggtgagaatgccgtggtggtgaactgccgcagcgcggatatcatcgtggggcccatcggcatcgtcattgcagatgcgctgctgggagagatcacccctgccatggccacggcagtgtgccagagcagcgccacccgggtgctgatcccggtgaaccactgtgaaaactatatcgtcggcgtgcccgaccagcccatcggcagccttgtagctgccgccgtgcagaaggtgaaagccctctgcgccgggaaaggctgctgaaattttttacaaacaaacaggcggctgtacaaaatgctgtacagccgcctgtttagtttattcagcgcatattactggtgcggtgctccatcagataggtagcctgcaggtctgcgatgtgcagtttgaccgccagcgggtacttgtcgtaagcttctgagatggcaaaacagccgccccgggccgcatcgtcaaagccgcccatgtgccagcggatggcaaccgcttcctccaccttcagcttcatgaaccgctcgatgagaaacacgctcttttcgccgtggccgtaggggaacagatcctctacactgtaaaagggcgctttttcccactgtccggtggcttcgttctttacgttgcgggtgcccagcttgtagtagttggccttgcacaaatcgtgcaacagggcacagatggcgtagctctcctcgctttcgccctcggtgaaaaagctgtcgtgcagcgcatggtagacgttcaggctgtgcatacacagcccgccttcacaggctccgtggaagcgggtggacgccggtgcggtgaaaaaatccgtctttttgtccagccagtccagcagcttttcgctgcccgggcgggtgacgtgctgctgccagatgtccagaaactctgcgcggtcgcccccgctcacagctccatgtcctccagaatgcccttgaggatggccaactcgtcatggctcagggaaatgcccttgcccatgcgggtgccatccggggaccagtcgcggatgtcgtacttgggctcgccgtcgttccagctgataaggttcagctgacgctcccagccgcggggacgctggctcagcacggctacacgctggacaacttcgtatttgatctctgccatattgcaaaacctgcctttatgtttgtatgctaccataataagggaagtgcggcgagatttcaacaggtaaactgaaatattttaaaaaatttttgttacgctcagccgtaaggggcgtcctcgcgccattccaccagctctaaaacggcggccgtatcctcgtccggggcggggtggcggctgtgcagcttttgctttgtgctgaatagcccgggcgcgtagtgtgccatcacgctggtctgcacgtccccggccagaaaggcggcggcattcttctggcggcaggccatgggggtgccgtcagtcatggggacaccgggcttttcgggctgcggcagctccggcgggggcagctgggtgccgggcgtgtccggcgcagccgggggctgcagtggcatactgcccagcggcggggcattgcgggtgctgcttgcctgcggggcggcagcggtgccgggctggttttccagttcgtggcggatgaagggttccagagaattcatcaaaattcacctccgcccctagtgtgccccgccagaagcgttttacacccgcagctctacggtggagccgccggtgcgggccttgtgcaccaccacctgccggtcgatgcggtccttgagcgcccccacatgggagatgatgcccaccagacggtcgccctcggtcaggccggagagcacccggatggccagttccagcgattcctcgtccagcgagccgaatccctcgtctaagaacaaggtgtccagccggatgcccccggcgctgctctgtacctcgtccgaaaggccaagcgccagcgccagcgaagccttgaagctctcgccgccggaaagggtctttacactgcggcgggtgccgttgtagtggtcgatgacgccaaggtccagcccggactggctgcgctggttctctgcaccgatgcgctccagctcgtattgcccggcggtcatctgcatcagccgggtgttggcatagcgcagaatgcggtccagatagttcatctggatgtaggcttcgaggcggatcttctgcttgctggtcaaagtgccgcccgccgtggcagccagtgcgctgacccactgccaccggctttccagcgtctgccgcgcctcggcggcagcgcggtactgcgccgctgttttgcggttgggcagcagttgtgccgaaagctgcttttcccggctgcgtagggtctcccgcgcggcggtcagttcggtctgctgtgcggtaagctcctcggcgctgcgggcgggcagttccttttgagcggcggtctgctgtgcggtcagcgcctccacagcggcctcggcggcggcaacggtctgttcagcctgtttcagcttgcgctgtgccgtgtccataccggtgcgcagggtgctgcggtcagcctccagcttgtccagtgccgcctgtgcgtccgcgcgccgggggtagggcagggcggcgcgccgctctgcgatttgcccctccagcgcgtcagcacttgcattctgtgcggcagcactgcggtcggcctcggaagcggactgctccagcgctggacgctggcgggtcttgccctgccggtcggcttccagctgtgccttgcggcggcagtcggcctcggcctgttggcactgggctttgcagtctgtctgtgccgcctgcaaagcggtattctcttcggccagaacgttggtcatcagggcaaaggtaaggggtactgtgccctccggcgtggtaaagcgctccggcagcagggtctcggcgtcccgccggagggaagttttcgcctcgttggcggtggccagtgcgctctgggcggcagcgctggcgttctgtgcctgccggtcagcttccgcagcggcctgccgtgcggcttccacctgtgcctgcgtgggcgcagtatggggcagcagggcgcgggcggggtgatgggtactgccgcacaccgggcagggtgcgccctcgacaaggctctcggccagcagcccggcctgtgcgtccaagaatgcccgttccagcgcgtcccgccgggcgcgggcttcgtcctgtgcggcggcagcggcgcggtaattttcctgcgccttgtgtgcggccttggcctgtcgctggcagtccgcaaggcgctgttccagctttgccagcgcttcgccgcgctgtgtcaactgggcactgcgattttgcagcgccaacagccgggtgtccgcgtttgccagcgcggcaagttcggtctcagcggcggcaagggcggcgttcaggctgtccagctgggtgcggcgcttttgcgcctgcgccgccgccagccgggcggcgtcccgcgcttcggtctgctgacggcagagcgcgtccagcgtgtcataggccgcaagggcgctctgcgcctgcgtcacctgcgcagtcagggcatccagctgtgcagcatctccggcgtggcggtcggcctcggcgcgggcggcgtccaatgcgggtcttgcggcgacaagctctgcctgacgggcagccagctgctgcgccagccgctgcgcctgtgcggcggcacccagctgctgctgtaccgtgtccagctgggcttcggtggcttgcagggcggtgccggcttcttccagcgctgccgcctgccgggcagtcagggtgtccagcaaggaaagcgccgtttccggtacagtctgggcgcacagggtgcgcagcgcctcggcgtccgggtcctccgggctgaattgcaacccgcccagcagactgtccagtttggcattctgagcggtacgctgctggttcagcgcggatgcttcggcctgtaagcgctcttgcagttgggcatagcgctgggtgcggaacagcttgcggaagatacggctgcgctcctcggtggaggcgttgagcagctttgtgaactggccctgcgcgatgagcacgatctgagaaaactggttgtagtccagcccgataatctcctgcacggcggcggtcacgtccttggctttggtcaccggcgggcggtcgtccgggtaggtcagggtggcatccgccttttcggtggtcatgccctcgccccgggccttggggcgctgatactccgggttgcggcgcaccgtgtagcgcacgccgtgcacctcaaattccagctccacaaaggtgggggtcttgtcgtctgcgtacttgcagcgcagcatggaaccctcccggatgccgctgctggaatgatcgtacagcgcataggtgatggcgtcaaaaatggtggtcttgcccgcgccggtgtcgccggtaatgaggtacagcccgcctttgcccagtttttcaaggtcaagggtggtctcggcggcataggggccaaaggccgaaagggtcagtcgcagcggtctcatacggtgtcgccctccttccagatctcctcgatcagtgcttggcagaacgccgtctgctcggcggtcaggggctgattattttgcagctggtaaaaggccgccagatgctccagcggggagatgctctcagtgcgctccggggcgcagatctcctgctgctggcgggtgcgttggttatcgtagtccagctgcatcaggttggggtagatgacccgcagccgcgccagcgcatccggtacatcctgctcgtcggtcagggtgatgtacagataatcgtccacggcggtgccctcgtagcagcggcggtcggtcagttccatgtagctgccccgcagcccgcgcagctcgtgccggggggtcaggggcgcggtggtgatgtgcacctcgccctttgcacccagctccacaaaggtagcgcttttgcgctgccccgcctccgagaaggagtacttcagcggtgtgccgcagtagcgcagcgtttcccgccccaccttctgcggactgtgcagatgccccagcgccacatagtcaaaggcatcgaacagggcggcgtccacgctgtccaccccgcctaccgagggctcctcgctctcgcaggcggcagcacccgccacgaactggtgcgccaccagcacgctgcggtggcaggggtccggggtgcagtgccgcagcacgcaggcaagggcgtcgttgtagctctcaataggctcgtccggccagacgtgccgcaccatggcgggctttaaaaagggcagtaagtacacatccaccgtgccgtgggcatcctgcagggggatgggctgcggcgcgccggtgaacaccgggctgacgtagacccggctgtcggccagcagggcagagccaaaggccacccggtcggcggaatcgtggttgccgctgatggcgaacaccggcagcttccgcgccgccagttgggtaaggaaccagtccagcagccgcaccgcttcggcagggggaacgggcttgtcgtaaagatccccggccagcagtacgccgtccacaggggtctcatccagcaaagttaggatctcttccagaatataccgctgctcctccagcatggaaaactcgcacacccgcttgcccagatgcaggtcggacaaatgcagaaaacgcaaacaggaacaccgcctttcaaaaaatgctttgtcctattataacgcagccatcgccgcaggtgcaaccaaggagaacagaaaaacggacaactgctgtttgccgttgcgaccccttctgtgaaaatgggacaccggagcgtccgcagacgctccggtgtcccgaaatttaaaatgatttttccgctgaatatggccaaagcgcacgcggaggcc

SEQ ID NO: 13844 - DNA, 5994 bp, Unknown
  gut microbiota DNA sequence
ccgttgcgccgctggaaccgctgtacggcggcagcggtggccgcaccgtatttgccgtcatctttcagccgctcgcccagagaattgagcttctgctgtaccagccgcaccgtgccgccggaagagccggtgtgcagcacgatgccggggtagggcactttcagcccatgctttgcggtgtagcgggtgtagagcacgttccatgtgttctgccccaccttgccgtccatgttcatcttgttcttcagctggaactcctgcacggcacgctgggtgccgacgccgaacttgccgtctgccttcagcgcatcgtaccatgtgcacgcatcgcgcacgccgttgagccacgtctgcacaagtgccacgtccggcccggaggagccgcgctggagcagggaataataaccgggaatcgccatagagggatccctcctttccctccatgctatgctccggcggggtgcggcgtcaccctgccagcagcaccgtctgccgccgggcggtcagtcggtgcgcccagtccaccagccggaaccgtagaatgtactgcccgcagacaaggtcgttttcggcaggcagagcgtagccgccctgcgcaaagctgcacagccccgggtacagcacacaccaccagttgcgcccgctgccgctgccaatatcaatgcgcacggcatcgtaccgcccggcgggcagctgaccggtggggtagcgccgggcgggaaagtacatattcacgagatacacccgcaccggggcacggatgccctgcgcagccagtgcccgctgtgccgccagctgaaactgcaaaagctgccccgctgcccatgcccgcgcctccggtgcgctgtgcgccggacactgctgcatcacggccagcaccgcgtcccgtacccggagcttggcgctctggtcagccacggcatcgctggccgcccggatgtgcagccgcagggtgtcggcgcacagcgctgccccggcatccagctgggtgcgcccccagcacagcccctgcaaagcgccgcacagcgcaaagcccaccagcaagttggcgcatagcagccgcatctgccggacggaaagcggctttaaaaaccagcgaagcataaaaaacagacccctcttctggaaatgataaccagaggatgggtctgctgcagcgggattatacaaaaagaaagatttctctcagtcaatgaccgagagggttcgtatcagttcttcaaagactgcatgggtgcgggcaggcggccgccgcggttgatgaacaccgaggggtcgtggctgttcaccggcatgatggggccatagcccagcaggccgccgaaatccagcacctcaccagccttgcggccgatggcggggatgacgcgcacggcggtggtcttgctgttcaccatgccaatggcggcttcgtccgcgatcagggcgctgatgacggcaggggtggtgtcgccggggatgatgaccatgtcgatgcccacagagcagacggcggtcatggcctccagcttttcaatggtcaggcagccgatctcggcagcatggatcataccggcatcctcgctgaccgggataaaggcaccggacaggccgccaacgtggttggaggccatcacgccgcccttcttcacagcatcgttcagcagggcaaggcaggcggtggtgccgcagcagccgcagctctccagacccatctcttccagaatattggccacgctgtcgccgatggcaggggtgggagccagagaaaggtcgatgatgccggcaggcacgcccagtgccttggaggcaaggtttgccaccagctggcccacgcgggtgatcttgaaggcagtgcgctttaccagctctgccacctcatcgatgggggcgtccttgggcagacgtgccagcgcggcgcgcacagcacccgggccggaaacgcccacatggatctcgcagtccggctcgccggggccgtggaaggcaccggccatgaaggggttatcctccggggcattgcagaacaccaccagcttggcagcgccgatgcactgacggtcggcggtcagctcgctggccttcttcacggcctcacccatcagcttgatggcgtccatgttcagaccggccttggtggcgccgatgttcaccgagctgcacacgatgtcggtctcggccagtgcgcgggggatggattcgatcaggcggcggtcaccggcagaaaagcccttgtgcaccagtgcgctgtagccgcccacaaagttgacgcccacctttttaccggcggcgtccagcgtctttgcaaagtccacggggtctgcctccgggcaggcacccagcagcatggcaatgggggtaacgctgatgcgcttgttgatgatgggaataccgtactcggcgctgatgcgctccacggtggagacaaggttcgcggctttggtggtgatcttgttatagatgttctcgcaggccttcttggggtccgggtcgatgcagtccagcaggctgatgcccatggtcacggtgcgcacgtccagattgtcctgcgtgaacatctcgatggtctccaggatatccccggtgttaaacatactcatagcggttgcgggctcctttccggctcagatggtgtgcatggcgtcaaaaacttcctgacgggtcacgttgatctgcatccccatctcggcggcaagtgcatcggtgcgcttgtgcagctggtcatggtcaacattgcagttgctcaggtccaccagcatgatcatggcaaacatcccctgcaggatgctctgggtcacatcctcaatgttgatgttcaactcggtgcacagaccggccacctttgcgacaacgcccacggtatcgtgtccaatgacggtaatgaaagctttcatggtttccaccctcgttttccttatagtgattggtgccgccaaagacccggcacacgcttacccttccagtatagcagatttagcaaattttgaacacactttttgtaaaaaagagcagaatacgggggcaaaagacattctatataaaaatcaagtgcaatctgccggggcttgtgctatacttatacataatttcccgcggatttccgtgtagagggttgataaggagtatatgacaatggaacagcttttgaagattctggaaaacaacgcccggctgcccgtggaggacattgccaccatgctgaacaaatcccccgccgaggtggcggcgatgatggatcttgcccgggcgcagggcatcatcaagggctacaagacccttgtggactgggaaaaggccaaggtgaaccgcgtggaggcggtcatcgagctgaacgtcagccccaaaaagagccgcggctttgatgagatcgccgccacaatcgccgcctttgacgaggtggagagcgtgctgctgatgagcggcgggtacgacctgcagctggtgatcaagggacagaccttccaggagatcgccctgtttgtggcaaagcggctttcgccgctggacgatgtgctgtccaccgccacccattttgtgctgcgcacctacaaaaaagaggggcggctgtatcaggatgaagaaattgatgaaagagagtgcacggtgctgtgatggattatgataaactgatcgcgcctgccgccaaggccatgcgcccctccggcatccgcaaatttttcgatctggccgccgaaatgcccgagtgcatcagccttggcgtaggcgagccggacttcaagaccccgtgggctgtgcgcgaagccggcattgaaagccttgagcatggccgcacccgctatacctccaacgccggcttgaaagagctgcgcgccgagatcagccggtatctggagcggcgcatgaacctgcgctacgaccctatgcggcagatccttgtgaccgtgggcggcagcgaggccattgatatgtgcatccgcacgctggtcaagcccggggacgaggtgatcatcccggagccctgctttgtgtgctacgaacccatcaccaccctgtccggcggcgtgccggtgcacgttgcctgccgtcaggaggacgagttccgtctgcgtgccgaggcactgaaggctgccattacccccaagaccaaactggtcattatgcccttccccaacaaccccaccggtgcagtgatggagcgggaggatctggaggctgtggctgaggtgctgcgcggcaccgatatcatggtgctgtctgatgaaatttacgcagagctgaactacggtctgcggccgcacgtttccattgccaccttgcccggtatggcagagcgcaccatcgtggtgaacggcttttccaaaagctatgccatgaccggctggcggctgggctacgcctgcggcccggaggcggtcattaaaattatgactaagatccaccagagcgccatcatgagcgcccccaccaccagccagtacgccgccatcactgccctgaaagagtgcgatggcgagattgaccggatgcgggacgagtacaatatgcgccgccgtctggtggtgcgcagcttcaacgatatggggctgacctgctttgagccccggggcgcgttctacgccttcccctgcatcaagagcaccggcatgagcagtcaggagttctgcacaaagcttttggagcaaaagcacgttgccattatccccggcgatgcctttggcgcttccggcgagggctactgccgcgtttcctacgcttacagtgtggagcacttgaccgaagcgctgaagcgcatccgggagtttttggtggaaaacaacatctaccacggcaactgaggaggaacacagatggaacggcgagagcggaaaaacgcagtgactgtgctggccccggccaagctcaatctggcactggatgtggtagggctgctgcctaacggatatcatgcgctggacatgaccatgcagactatcaccctgtacgagcgggtgatgctgcgccgcagcgccgggctcagtctgcgtttgccgggcagccttgtgcagcccaacgataaaaataccgccatcaaggcggcactggcgttcttccactataccggcctgctggcgggggtggatatcaccatctataaaaataccccggtgcgggcgggcatggcaggcggcagcgcagacgccgccgccgtgctggtgggactgaacgccctgtacggcgcaaagctttccatgagcgaactgtgcgcgctgggcgcaggcatcggtgcggacgtgccctttgccctgatgggcggcacctgccgggtgcagggcgtgggcgacctgctcaaggcgctgccccctgtgccggactgctggttcacggtagtgatgccggactacggcgtgtccaccccggaggcctttgccgcctacgataccgtgggcagcagcacccacccggactgtgaggcgcaggaaaaggctatccgcgccggagacctggacgccgtatgtgctgccgccgggaatgcactggaagagtgcagcggcgcaaaagacaacgaaaggatcaagtcccttcttcgcgcgcacggcgctgtcaccgcgctgatgaccggcagcggcgcggcggtgttcggcgtgttccgggacgaagctgccgccagaaccgccgcagcggcagcaaagcggcagtggccgcaggtctacgttgccaagcccgaccgtggcggtgcacgggtgatccgataaaaaagtataaacctccttcccgcagggcatactggccccaaaggaaggaggtcttttttgtgcagaccttttacaaaatctgcctgctgctgctcattgtgggcggtgtgaactgggggctcgtggggctttttcagttcgaccttgtgggttggctgctgggcggcagcacctcggtgtggtcccgcatcgtgtttgcgctggtgggcttggctgcccttggctgcattccggaactgttcagcgaagaaccggaggaagaataacaaaacggctgctgcacgcaaagtgcagcagccgtttgtgcgttgcagcgcttccg

SEQ ID NO: 13845 - DNA, 581 bp, Unknown
  gut microbiota DNA sequence
ttgactgctgcgtggtctactacaatcagaactgggacagaaacctttccaccgtgttctgggaggatttcgaactgaagaacacctttggggaatatggcccggacattcttgtgcctgtggttggcgagaatctgggtgtgacctgcggtaacattctggggcgtagctatgagctgctcagcgaattgcagccggagggctatctagtgctgggcgataccaactcctgcctgtctgccatctctgcgaagcggctgcacattcctctgtttcacatggaggccggcaaccgctgcaaggatgagtgcctgcctgaggagactaatcgccgcatcgtggatgtgatttctgacgtgaatatgtgttattccgagtttgcccggaagtatctggcggacaccggactgcccaaggaacgcacctaccagaccggctctcccatggcggaagtcctgcacatgaatctggagaagatccagaaaagcgatgtgctggagcgtctggggctggaaaaggacaagtacattctgctgtctgcccaccgggaggagaacatcgactctgaaaagaacttcctg

SEQ ID NO: 13846 - DNA, 243 bp, Unknown
  gut microbiota DNA sequence
gcaactttacggctctgcttcggcagagccgttttttgttgcccccttttccggagaactggggagcacgactgcgcatctccggggttgccccgcaaggggcgagccggaggcacttacaaaaactttgctcaagcatcgcgtgcagggcgcagccctgccagcgatgctccccagttctccaagcgctgattatatttcagatgcaactttacggctctgcttcggcagagccgttttttg

SEQ ID NO: 13847 - DNA, 7700 bp, Unknown
  gut microbiota DNA sequence
actgagagggtctagtcctctttcttatccatgatatacgccgccatgccgatggtgccgtcatccgggtcctcgccatcgtagacttttttgatgtagctgcggttgaagttcaggtgcatcaccatggcagcttttgcgccgatgggatcgtggttggcaatggcctcggtgatcatgcggtgggtcatgatggtctcgtcgatgagctttttgtgggtgacgttcacgaacatcatcaccgccgtgtcgatgaccgggatcagctgccccaccaccagattcttgctgctctcggcgatgcaggtgtggaaggcgatgtcatcctcgatgtagcggtcgccctcgtggatcttggcctccacccgctcgcagagccgccgcagccgctcgatgtcctccggggtggcgttctgcgccgccatctccgcaatgcccggctccagcagcagacggacgtttaccagatcaaaggccagcgcattcttgtcctgcacgctgcgcaggttcagcgggtcggaaagccccttgaccgtagtcaccacataggtgccggagccctgccgcacctccacgatgcccttgctggacagcagcttgaccgcttcgcggatggtgctgcgccccacccgaaacttttcgcccagcgcaaactcgttgggcagctttgcgcccggctccagcgcttcgtccagaatataatggtagatctgatcctccacctgctcggccagcagcttgtttttcaggtgtgaaaattcgctcatggaagcttcctccgcgccctgcgcatctgatggtttggttacccgcacacactgccatccggggcaaagaactgaacgtgcttttgccactgggtggggctgatggtgcggcggtagcagtcggtcagtgcctccactgcggcctccggggcaagggaggcgcagcccgggcagtccagcaccagaatacggaaccatgcgtcaaaaagatgttcggtgtagtgggtgtcccatgcgccgcagcgggcgtaaaagcccagccgccgcaccgccatggcggcgtctccggccttttccggcatttcggcttcaataaggatcgcttcggcatcgccctcctgggcaggcagctgtgccagcagctgtgccccgatgccgtgggcgcggtaggcaggcactacggcaaaataatccagctggctcacccggcagccctccggccgcaccatcaaaagataagccgccagcgtgtcgccgtcaaacacgccccatgtgtgggcggtgccctccgcttcgctggttaggatcatgctcaggggcttcagctccccggcggggaaatcccggcgcatctcgttcagatacacctcggtcagctcttggccggtgagcagccgccatgtgaaggttttggtacacatacgataaagatccctttccgatgccgctttgcgcagcatcatattttttcctgtcctgtatagcataccggatgttttaccgaaagtcaatctgtgcgccctttcgggcggcagcgccgccggttttgccaaggggcttgcatccgggcgcagaatcgggtactatacaggtgacagaatttttccctccggcgctgccggaagggcaaggataaaaaggagacttgtactatggaatggaccgatatccgcctgaccgtggccaaggctgatgccgaaaacgccgaagccgttgccaccctgatcgccgagggcggcatttacatcgaggattacagcgacattgagcagcaggttgctgagatcgcccatgtggacctgatcgagcaggagctgctggacaagccccgggataccgtgatcatccatctgtatctggagccgggcgcttctcaggtggagacgctggcgctcatcgccgcccgcatggaagccgccggcatcccctacaccgtggagaccgagggcgtggagcaggaggactggcagaacggctggcgcaaatactaccaccccatggagatcggcagccgtctggctgtggtgccctcgtggcagcagtacgacaccgaccgggtaaagctgatccttgaccccggccttgcctttggcaccggcggtcacgagaccaccagcctctgccttgaggcgctggacgagcaggtgcgcggcggcgagcgggtgctggatatcggcaccggcagcggcatccttgccattgccgccctcaagctgggcgctgccagcgccgagggtgtggacatcgaccccgtggcggtgcgtaccgccggggagaacgcagccctgaacggcgtgcaggataagctgaccgtgctggtgggcgacctgtccgacaaggccagcggcacctatgatatcatcactgccaacattgtggccaatgctatcctcagccttgcgcccgccgtgcccggcctgatggccgagggtgccacctttattgccagcggcatcatcgacagccgcaaggacgaggtgatcgctgggctggaaaaagccggtctgtccgtcgtggaagtcaaggaaaagcgcggctgggagtgcatcgtctgcaaaaaggcctgagattcaaatattataagaaggagcgcacagtatgccgcaccgctactttaccaccgagatctccgacggcaccgccaccctgcggggtgcggacgcccatcaccttgcccgggtgatgcgggcaaagccgggggataccgtcatcctctgcgatggcaacgccatagagtacaccgccaccatcaccggctttggggaggacagggtagattttgccgtagagccgggctaccccagtgccgccgagcccaccgtggaggtgactttgctggcgggctaccccaagcaggacaagctggaacagatcatcaagcacggggtggagctgggcgctgcccacatcgtgcccttcttcagccgctactgcgtcgccgcccccaaaaaagaggagcagaagaacgagcgctacaaccgcattgcgctggaagccgccaagcagtgcggccggggcgttctgccaaacgtagccctgccgctgccgaactttggggcggtgtgccgcagctttgaccagtacgaccttgtgctgttctgctacgagtgcggcggcgcacccctgcgtcagctgctggccgaggcaaagcccgccgatgggcaaaagctgcgccttgccatcgtgaccggcgccgagggcggctttgccgccgaggaggccgaaatggccgccaaggccggggcaaaaacggtgggccttggcccccgcatcctccgctgcgagaccgccccgctggcggtgctctccgctgtcatgaccctgacggggaatctggagtaagacgcttgacgatttaaatggtctccgctttgctctgaccatcttcagcggaataattatttaaaattggcaccccgggaaaatctgcggattttcccggggtgctttttcacggaagggggtcgtaaagaaaaacgacagctataacaaaaaagagcgaaagaggctgctgcacaggggtttgtgcagcagcctcttattattttacgttatattacgttttgtaaaagcattttcagccgttttcccctgcatccgggtgggcatcggtgtccagcagggctcgctttaccttgagcaggttctgggggcttaccgagaagctgcgcagaccgaggtgcaggtactgcgccgtgttggcggggttgcccacggcaaggccgcagatggtcaccgggacgtggtgcgcgctggcggcatccatcaccatggtgatcaactttttcatggccgggctggcggggcggtagtagtgctccgcgctggcaagctcccggtcggcggcgtgggtgtactgggtcaggtcgttggtgccgatgaccagaaaatcacagccgtgggctacaaagtcctccacggtcaggcaggcggcggggatgctcagcatcacgccgaactgggtgttctcgttaaagggcacgccccgctcccgcagactctggcggcagtgttccacaatgctcatggcggcgtcccagtcctctacatcggtcaccatggggaacatcacccgcagcggcccccgggcggcggcgcgcagcaaggcacagatctgggtctggaactgctggggctggcgcaggctgttgcggatgccgcgcaggccgagtttggaggactgcggcccctgattggcatcggccacggtgcggtcggagccaaagtcgaaggtgcgcacggtcaccgggcagccgtttgcggcggccagacaggagcaatagaagaaatactgctcctgctcgtccagaatgcgcccgggcagcatcatgtagccgctgcgcagcagcccaacgcccttggcaccggactgcatggcggtgtcgatatcctccgggccgaagcagttggccagcagctcaaagggttcgccgtcccgcgtttcgtccggcaggctgtgcagctgcttcatctccgcgtcctcgcgctgaagctggcagatgctggcctccgcctgctggcgggcgacggcatccgggtccaggatgcagttgccgttggttgcgtccagaatgacggtgcggccatcgcagtcgtccagaaaatccttgcccacctgcacgatgcccgggatgttcattgcccgggcaatgatggcggcatggctctggccgctgccctcggcggtgatgacgcccaagatcatgccggagggcacgctgaacaggtcggtgggcatcagccggtcggcggcaaggatcaccggatgatccagcgccagccacacccggggacggttggtcaggatgttgatcacccggcgggtggcgtccagaatatccacgctgcgcagctgcatataggggttatccttcatgttggcaagctggtcggcgtagcgctgccccacctgatgcatcgccgccgaggcgctgatgcccgcattgatgcaaaagcgcacctcgttcatcatgccctcgtcgtccagcatcatgctctggaacaaaaagatggcctgctcggtgggggcggcgcgctccgccatggagtccagttcattctgcgccgtgtgcacggcatttgccagcagccgcagttcccgctccgggttgaaagggccgtggctgaaggtctccacatggtgctccagccggctcacctgacccagcaccagtccgggggatgcggatacgcctttataaaccttcatcttctgtcacctccggcaaagccggtgcggtcaaagtgcgccacaccagcgcctgtaagaatgtattgggcagcaaagcggccagcgctgcctgcccggcggtgctgctgcccgtaaacagcggggtaaagctttccatacgctctttgtcgcacgcggccagaaacgcctcggccagcgtccgggtggtgtagaagtgggtggggtctaccccggcgtcctcagcggcggcttccagcggggcaagctgggcgtccttcatccgtgccagcagcaaagcagcgtcggcggtcagggtgaccgggtacttctcccgcacctccttctgcactgcgtcaaaggcggcgcggaaggcctcggcatcggcgctgctgtccgcaccgttgtccaccgcgtaggcgcagccccggatgtggccaaaggcgcgcagggtgtcgtagtagcccagctccatgttgcgcttggcggtgtcggggtcgaagtgcaggatatcgcccagctcccagtagctgcggatcatggtggtgggcaggccggtcaggttggggcgggtgatgcccacgccctccaggtccacacagacaagctcctctgcgcccatggtcttggcaaggccggtgggcatattatcgctgtacccgccgtccagaaactttaccccgtcgatctgccgcgcccgcaatgcggggaagcaggccgccgaagccatcaggtagtcccgcacctgcccggcggggatatcctccagcgtcagctcccgggggcgcagcccgcgctgctccaccgtcacgatgccgaaccggatgggcgctgcccgcagcgcgtcctcgtccagcacccgctccacgatctcttccagcggggtcacatccatgccgccttcctttaccacccgacgcagaaactggtgcagggcggaaaggtcggcgttttcctccggcagctccatcacatcccgactgcggatggtcagccacatatcccgggcagtctcgtacaggtccagcacgaacatggcgccgttcagcccgcccacgctggtgccggtgatgatctgcgggtgccagtccagctccatcaaagcccgccagacgcctacctgatagctgccgcgcgcaccgccgcctgccagcaccagcgccttttgcgtgggttctctgcgttccatatcaagccctcccgtgcacgttcccggtattttctaaaattgttataattataccatactttcaggtaaaattctcccgatttttcagagatcatgcctttttcctgtgaaagtttcgtgctatactagccggagatgagtataaaagcggcccggagggcgcacaacaggaggaacgtatgcactgcaaacaatggatctttgatatggacggcaccctgaccgacagcatggtggtggtatgggagggcgccccggaggcgctgctggcgcgctttggccgcaccccgaaggcagacctgcacgagaccctgctgaccatgggcatggaggacggcgcacagtacctcatccgggaatatgcgctgccgctggacaggaacggctatctggacgtgatgcgcgaggtgatcgcccagttgtacgagaaggtggaactgaagcccggcgtgcgggacacccttgcccggctgcgggccgagggcgcacggatgtgcgtttgctccaacacatggagcagccagtgccgcaccgttctgacccgccttggcatcgacgaatactttgatttttacattgaggcgcggggtgctatgagcaagagcagccccgctccctttatggaagcgctgcaccgccttggcggcacaagccctgccgggtgtgccgtgtgcgaggacgcgctctacgctgcccagaccgcccatgacgccggcttctatctggtgggcattcaggacaccaccagcgccgccgacgcccccgctttgcgccgcatctgcgaccagttcctgccggactggactgcactggactgggcgcaggcgtaaggtttcacaaaactgccacagtgcggcgctcttgtaatccgggtgccgcaggagtatgataataataatactcaaattttgtcgtcaaaaaaggaggccctgccatgacgaaccctctcgtcagcatcattgtgcccgtgtacaacgcccagaaggggctttcccgctgtctggaaagtatttgcggccagacctatcaggagctggagatcatcgtgctgaacgatggctctacggatgacagccttgccatttgtgagcagttccgggcaaaggatccacgcatcgtggtggtggacaaggaaaacgagggcgtttcctgcacgcggaatgccgggcttgtccttgcacacggcgactatatccagtttgcggacagtgatgacgcactggatcccgattacacccagaaccttgtgcaggctgctttgcagcacagcgcagaccttgtaatcgccccatactggatggtgattccttcaaattccaccaagactggttacttc

SEQ ID NO: 13848 - DNA, 8524 bp, Unknown
  gut microbiota DNA sequence
acagccgggaggactacgcccgccgcctgatgcagcagcccgcctccttttactacggcgtgctgtggaacaagctctaccgccgggagatcattgcgcaaaatcagcttgcctttgcgcccgatgtgcactgggccgaggatctgatcttcaacatggggtatcttgaacatgcggaggtgttcgtttccattcccgaggccggatatcattatatccagaaccccaaaagcctctgccatacccagatcgacctgcgcggcatcgtagagaacaagacacagatttttcagctgttcaaggaggtgtacacccgccttgggctgtacgaggagctgcagccccagatctacaaattcctgttcgccttttcggagagcggggtaccctcggacagcctgcagggcgctttgctggatgcgatgtcccgcctgaacgatgcctctgtccagtccgagccctcccgcaaaaagccccgccgcaagccccaaaagcacgcccgccgcaaaaagccccggcataaggaagaataaatcgttaaacaaaaaagtcgctgcacgaatgtgcagcgactttttactttttaccctacccgggcgcagaaagcctcccggacggcggcttcccgcccgcgggggatggggatgcgcgccccgctgcgcatccgtacctcgccgggtgccagcagctgcaccgcctccagattgaccacataggagcggtgcggctgcacgaagcggccgtccgcaagcagcggctgcgccaccgcagaaaagggcacccgcagcgagagggaggccacatcctctccggtggtcaggtggaagtgcacgatgtggtgggtgcattccagatattcaatttcggcataggtcagcgcccgcacaccgtcggcggtggtcacggtaagggttgggccgtattccggctccaccgcccgcttgagcagggcagaaacttccggctggtgcaccggctgcagcagatactgcatggcgtccacccggtaggcactgtatgcgtgcgccggggtgcgggccacaaaagccagcggcgcgcggcggccccggcggcgcagctctgccgccgccgtaagcccctcgggccgggctaccgccgcaagctcaatgaggtacagctcgtaccgcagcccggcggcatcctgctgcaaaagcgcttccgggctttgcagctgctccacgatgcaggcgtcctcccgccgggcgaagaactccatgcactggtgctccagcctgctgcgcagcgctccgtccgggctgcagatcgcaatgtgaaagatcatggtttggtttcctttgcagggtagacgatttggaatggcctccgcgttgctctggccatcatcagcggaaaaatcatcttaaatcaagcaattccgggcagactgcggtctgcccggaattgcatttttacggcaagagtcaggacggcaagcggcagctgacttttgttctttttagcgttagcagccgatggcagcgcacttctcggccagccatgcgcgctcgtcctcggtcaggcggggtgccagctgctcgaacaccttgcggtggtagtcgttcagccaagcaacctgctccttgtccagcacgccgggcacgatgggagaagtagcgatgggcacaaaggtgaggggacggaaggcaaggaaggtaccgtactggttgtcggccttatggtagcactcgatctcgttctcgatgcggatgcccacctcgccggcctcgtacacgccgggctcgtcggtgacgatcatacccgggcgcatcagggtggtgttgcggccgttcaaagcgtgggggccctcatggacgttgcccacaaagctgacgctgtggccggtgccgcagcggtagttgatgaggtgacgccacagcggctcgcgggcgatggtgtccagcatatggcagtcgcagtaatccagccagacggccttggcgatgtcgatgtggcactgcagcgtccaggtatagaacagccgctcgtcctcggtcagctcgcccagcggataggtacgggtgatgtcggtggtgccgtccagataggtagcgccgctgtccaccagcaaaaagcccttgcgctgcagaacggcgtgatcctccggagtggcgtggtagtgcatcatggctgcgttgccgccgtaggctgcaatggtgccaaagctttccacaaggaacttatcgtctgcgctgcggtacttgtgcaggatctcgtccacggtcagctcggtcagctgttcgccggaagccagacggttctccagttcgatctggaaccgcaccatagccacggcgtcccgcagatgggactcgcgcaggtgtgccagctccacctcgttcttcacgcccttcatggccagcagggggtcggcggcgtccttcacggtcagggcggggttgttttccagcacctgatacacggcgtagttcacggtggcgctctcggccagaacagtctgcggctcgatctcggcggccatcccgtccagaatgctgtcgtagtcggccagcgttacgccgttggcttccagctctgccttagcctccggggtgacccgcgcctgatcgatgaacagcacggcgcgattcggggtaacatagcagtaggccatggcgtatggggtgcactcgatatccatggcgcgcaggttcagaagccatgccagattatccagcttgcctactagctgggcggtgcagccctgctccttcagtttgccgcgcagctgctccagcttttctgccggggagaagccggcgtattccttgggcagaatccatgccggggtagccgggcgggcagggcggccctccacccacagctcgtcctccaagaacagggtcttgatgctgccgtgcttgggctccagttcctttttcaggctgttgaccagtgcacagttggcggtcagaccgcacagacccagcgtgccgccctcgggcagcaccttgccgcagtattcctcggcggtaggcacgcccggctcgcccatgcgcatcagctggatctcggtaccggcgatctctttctctgcctgcacaaagtaccggccgtctgcccagacggcgctctcggtcatggtgaccacaaagttggagttctcaccgtggaagccggagaagtaggtcagggaggtgtagtggtcgggcagatactcgctggaatgcgggtcgcccaccgggatcagatagacgtccacgccgtttgccttcatagcggcacgcagcgcggccagacgctcgggaactgtgttcatactcataacaaaagccctctttctgtcatttgccggaaaaacgtccggcggcgatggtttgctgctgctattgtatcattctgcgggaaagaatgcaatgcgggggcaaaactccccccaaaacgccgtcaatttgcaaaaaaagttacaattttttcttgaaaaaggccggttttccattgacagccttgttataatagaggtgtagtatttttgggtcagcactctgcggccctttgcgctaacaattgcgaatattgcgataaaaagaaagaggcatttggaacatgactaaaatcgatatcttctccggcttccttggcgccggcaaaaccactctgatcaaaaagctgatcaccgaggcctttgcaggccagcaggtggtgctgatcgagaacgagttcggcgagatcggcattgacggcggtttcctgaaggaaagcggcattcagatcaacgagctgaacgccggctgcatctgctgctctctggtgggcgatttccgcaccgctctgcagcaggtggtggagcagtaccaccccgaccgcatcgttatcgagccgtccggcgtgggcaagctgagcgatgtgacccgcgccgtggagggcgtggctgagcatctggacgtgcagctgaacagctttgtcaccgtggccgatgtgaacaaggtcaagatgtatatgaagaacttcggcgagttctacgatgaccagatcagccatgcaagctgtatcctgctcagccgcacccagaccgccagcgaggaaaagatcgccgctgccgtggcaatgctgcgggaaaagaaccccactgccaccatcgtgaccaccgcatgggatcacctgaccggtgagcagattttgaaggccatgtccaccaaggacgacttcaaggccgaactgatcgccatggctgccaaggcaaacgaggagcacgcccacgaggacgaggaagaagagcacgagcatcaccatcatcacgacgatgagaacggtgtgtgcagctgcggccatcatcatgaccacgatgacgatgatgacgacgaggatgagcacgagcatcatcatcacgaccatgacgagcacgatcatgatgaccattgctgctgcggccaccaccacgatcatgacgatgatgacgacgagcacgagcatgagcatcaccatgaccatgaccatgacgagcatgaccacgaccacgaggagcacgagcatcaccacgaccatgacggtcattgctgctgcggccatcatcatcacgaccaccacgccgacgaagtgttcaccagctggggcgtggagacggcccgcaagttcaccaaggccgaggtggagcacgccctcaccgagctggataccggcaattacggcatgatcctgcgcagcaagggcatcgtggacggcggcgcagacggctggctggagttcgattatgtgcccggcgagtgggaagtgcgcagccgcagcgcagacgtgggcggcaagctggtggtcatcggctccaagctgaacgagaccgccatcgcccagctgttcggctgctgagaaccccattattgagagaaggagcaaccatttattatggcaaaagagatcccggtctacctgtttgtgggctttctggaaagcggcaagaccaagtttattcaggagacctttgaagaccccaatttcgactccggcgacaagaccctgctgctgatctgcgaggagggcgaagaggagtataacgagaaaaagttcgccttccccggcgtgaccgtgaaggtgctggaggataagtctgaactgaacccccagaaccttgcaaagctgggcaaggaagcagacgcaggccgcgtggtcatcgagtacaacggcatgtggctgctgcaggatttagcggatgccctgcccgagaactggctggtgtaccagtgcattgccactgccgacggcaccaccgccctgacctacgcccgcgacaactccatgcgcagcctgatgctggacaagatcgcccgcagcgagctgatcgtattcaaccgcgccgaagccgtgaacaacgacgacgcccggcaggagctgcacaagctggtgcggcaggcctcccgtaagtgcgatatcgcctacgagttcaaggacggcagcgtagcctacgacgatatccccgacccgctgccctttgatatcaacgccgaccccatcgacatcccggatgacgatttcggcatctggtacatggactgtcaggatgagccccagaagtacaccggcaagacggtgcgctttctggcacaggtctgccagaccaaccgcgccggcaaaaacagctttgtgcccggccgctttgccatgacctgctgcgtgcaggacatccagtttgtgggcttcccctgcagctacgatggttacaaggcgctggaacagcgcgcttgggtgcgggtgaccgcaaaggtggggtacaagttccacaacatctaccggggcaaaggcccggtgctgaccgccgtgtcggtagagcccgccgaaaagcccctggaagaggtcgtaacgttctcttaacgtttctgtattacaaggaggttctggtatgaaaactctgttccgtattcttggcacggctgctgccgtggccgtcaccggcgctgccatcgtggtgctggacaagatcctgaaccagaaagacccgctccatgtggaggaggtcgagttcccggaggaagccgaaaaggacgccgaggaggccgaaaagaccgccgatgcctacgcggaagccgaagccaaggaagaagcaaaggctgccgatgccgccgcagaagctgccgaagaaaccgcaccggaagcccctgctgagaacgcaccccagacccagccggagaccgccgaagagcgccctgtgtacgaccccgaagccccgaacgccaaccccgtagaggccggccccgccgttgcccccaaggatgagaacggcaagatcgacgtcaccaagatcgccgatgccaacgatttcggcgactgggaagagcagggctgcaagggctgagaaaacagcatgatccccgcataggcgcggatatcagctcccccgaaagggggagcttttttgtgcttgcaaaatgccgcgcagttcactatactggaagaaaaaacaccgatggagggcagcaccatggcatacaccgatgattgggaaagcttgatgaacggcgtgttcggcgcgggcggcaaactgaagttcggcggcgcgcagccgcagccggaaaagccgcagcccgaaaaaccggcgggcagcggcctgccggacctgaacgcggcgctgctggaacagcaaaagcagctggacgaattgctgaagcagcagaacgcccggctgaaggcgcaggatgccggggtgcagacggcgctggaggacagccgccggatgctgcgggatatggaagcggacggcctgctggccaagggtacggcagacacaaagccggagcagctgggcagctttgaaggccttgccgccgaggtaaaaaagaccgtcctcgggcaggatgcctttgtagacagcgtggtgcgggccatgcgccgcccctttgtgctgggcaccgagggcgcagccgcccgcaatgtgatcctgctgtggggcgccccgggcacaggacggcactttgcactggcggagactgcccgcatcatggcggcgcgggggcttttgcagagcgaccggatggcggtgatggacttggcactctaccccgaccccggcacggaaaaactgtttttgcaggacctttacgccgccctgcacgccccaggcgagatcgtggtgttcgagcactacgagagctgccaccccggctttttgcgcatcctctccgaccttgcggtcaagggcagtacgcccctgtccagccggtatctggtgaacaaagagggcattctggtggaagccggtacagcacttgcccccggcgcagtgagccgcatcgacccctgcggcaagtatctgatcttcttctcccgcaagggacgggaggcgctggcggataaattcggcgcgtcctttgtggcggcggtaggggatgtgtgccagaccgccccctttaccccggaagcattggctgcgctggcggcgcagcagctgaacgcgctggcgcagcgggtgcacagccgtctggggctgacccttaccgccggggcggatgtgcgggactatgtggcggcgcagtgctccaaggaaaagggcgcagaggggctggcagactgctgcgagcggatcttccgcgccctgagcgagtactgcttacagaccgacacaaagctgtccggcacggtggcgctgaccgccgcacccgaagggctgcaatttgcactgaacggtgccgccccggcagacctgttcagcctgcttccgacggcctacaccggcgcggtggagcagatccgcgccgagctggatgcgctggtggggcttgccccggtcaaggagtatgtgttcggtctggcagacaatttacaggtgcagcagcgccgcgcagcggcgggcttcaagaccgcaagcctgtccatgcacatgatctttaccggcaaccccggcaccggcaagaccaccattgcccggctggtggcaaagtacctcaaggccatcggcgcgctggggggcgggcagctggtggaggtgacccgcgccgaccttgtgggacgctacaccggccacaccgccccgctgaccaacagcgtcatcgaaagtgcactggggggcgttttgttcattgacgaggcgtacagcctgtaccgcggccagcaggacagctttgggctggaagccatcgacacccttgtaaagggcatggaggatcaccgggacgagctggtggtcatccttgcgggctacaccaaggagatggaagtattcctcaccgccaacagcggccttgccagccgcttccccaacaagattgagttcccggattacaccgcagacgagctgctggacatcaccgccgtgctggccaagggcaagggctaccgccttgccgagggctgcaccttcccgctgctgggctactacaagcgccgtcaggcgctggacagccgcaccgccggcaatggccgtctggcgcgcaacacgctggaaaaggccatcttcaaccagagccgccgccttatcgccgagcccgccgctccccttgacctcatccagcccagcgatctggaatttgaggaataagcgcccttgcgccgggacgatttagaatgcgctccgctttgctct

SEQ ID NO: 13849 - DNA, 743 bp, Unknown
  gut microbiota DNA sequence
tattctttccatcaacgacactgcgattcccgatccgcagcccctttggggtgcggatttcatgttctccgttgctcatcttcttacggcctcctttgtgttggtttaagtttcttttttctattcaatttcaccttttgaacttccgttcttttttcacctttttcagcttgcatattcacattttttacggtataataatccaaaagatgatagaatatagcatatattgtaagcaagtcgtgtcgccgtgtcaagagaaaaatgtgaaaatttgttgcatctttcagattgaatattcacagattccattgcacattgttacagcacgataactacaccatagaaaggttgcaaacatgaaatttggagagaaagttcgcgatctacgaaagaaacattctttaacacaggacgaattggcacaatgtctgggtatcaacaaacgaacgatcatcggatgggagcgggatggccgctaccctcgcagcattgaaatgcttgaaaagatggctgatatattccatgtacctttgacctatttacagccggatcagtctttatttatcgaacgtgccgccgaaacctacggaaaaaagggcaaaatagaagcccagcatctcgcatttgagcttactgagctatttgccagcggagatttgaccccgcaggatatggacggcatcatgtatgaaatgcacaaagcctattttaagtaccgagaaaaaaaacgagaaaaggaa

SEQ ID NO: 13850 - DNA, 1043 bp, Unknown
  gut microbiota DNA sequence
ctttggttttggcgatgtcatccgggtgtcggtgaccatccagaacggaaaaatgaccgatattgcggtgctggatgcctccggtgaagataagccctactataagcaggcgctgcctttgctggacgagatgctggcagtacagtctgccggggtggataccgtttccggcgctaccctcacggcagaaggtcttatcggtgcagtcgaggacgcactgggaaaggcggcaggatgatggaaaaaccacagacaaagcctttgacggcggcgcagcagcgtcagcgggacaaaaaacaccgcacatggctgcgcgccggggtgcagctgttcttctttgtgtccatgccgggcgcgttcgtggccgggttttccggggtaaagcagatctttctgcacatcggtgcgggcgagatgctcacagcggacagcttcacgctttctctgctggggctgtgcggcttcactttgctgttcgaccgttttttctgcggatacgcctgcgcctttggcagcttgggtgatgccgtttgggcactgtccgggcttatccagaaaaagctgttccaccgcaaaaagccactccgtctgccggagcgggcggtgctttgggggcagaaggtcaaatatctgctgctggcggggctggtggtgctgtatgtgacccggcaggaaaagctgctgaccggcgcaagcccgtgggaggtgttttcccgcctgacagctctgcgtctgccgccggaggacttcggcgtgggcattgcgctgtttgtgctcattttgctgggcatggcagtgcagcctcggttcttttgtcagttcctctgccctatgggagcggtgttcgccctgctgccggtgctgccctttgcgcggctgcaccggcagagcgatggctgcatcccggggtgcaatgcctgcaagcagcagtgcccggtgtgcctgaagctggaggaaaacagcctgcgcagcggggaatgcatcgcctgtgaagcctgcgtgggcacctgccctaaacagaacatccaccggtgggatatagc

SEQ ID NO: 13851 - DNA, 5255 bp, Unknown
  gut microbiota DNA sequence
atcggcaccatcaaggttctgaacaaccgcggtactaccctgcccggcaccggcggcatcggcaccaccattttctacgttgttggcggcggcctgatggttgcagcagctatcctgctcattaccaaaaagcgcatggagaaccgctaagctctccttttcccctgcacagagcggggctgcaaagccccctgctctgatcctgaaactataacgttagggagtagcccatgaaaaagaacaaaagcactattatattgatcctcgtctttttcgtgggtctatccgtgatgttataccccactatcagcgattacgtcaaccagcgcaaccagtcccgcgcggtggcaagctacgcgcaggacgtggacaaaatgaccgatgcggattacagcgcctactttgacgccgccgatgcctttaacgcacaggtggccgccaacgaaaacgccctcttccgcccggatcagctttccggctacaacgaaacgctggatattaccggcaccggcattatgggttacatcaccatttccaaaatcggcgtggagctgcccatctaccacggcaccagcgacagcgtgctgcagatcgccgcaggccacttggagggcaccagcctgccggtgggcggcgcgtccacccatgcggtcatctcggcgcaccgcggcctgcccagcgcaaagctgtttaccaacctcgaccagctggaagtgggcgatacctttaccatcaccgtgctggaccgggtgctcacctacgaggtggacaaaatctccatcgtgctgcccaccgagaccgatgagttgaagatcgccgaaggcaaggactacgtcaccctgatgacctgcaccccctacggcatcaacacccaccgcctgctggtgcgcggccgccgcgtagagaccccggatcagtacaagcacctccgcgttaccgccgaagcgcttaaaattgaacccattattgttgcgcccattatggcgctgcccatgctgctgatcttgctgatcggtatgctgatttccacacgcaaacccaagaaaacgagaggtgaagaacatgaaaagcattgatctgcgtcatcgtctggcggctgtgctgctggctatgtgccttgtggtatgctgcgccctgccggcgtttgccaccagtgccaacattgtactggggcgtctgggctcgctccatgtccgtctgtacgacacccacaacgatgtgcccctgcgcggcggcgaacttaccctgtatcaggtggcctccgtcaagcgcaccaacggcaacctgtactttgactataccggcgattttacgggctgcggtgtcgtgctgggcgatctttccgacagcacgctggcagaccagctggtaaagtatctgcccgctgtgcccgccattgccgcccagcaggacgtgaacgaagagggctatgccaacattaccaagctgccgcagggtctgtacttggtcgtgcagaccgaggcatcccacggctacgaggccatcaagcccttccttgtgtccatccccatgcccgatggcgacaactggatctacgatgtggacgccacccccaaggtaggcgctaccatcccggaaacgccggacacccccgacaccccggatgtgccggatacgcccgacacaccggacacccccgatctcccggagcagccggataacccggatacgccggtgagccccggcacaccggataacccggtaagtcccggcaccccggacaacccggtaagccccgaaaatccggataacccggtctccccttccacccccgataagcctgttctgccccagaccggccagttgaactggcccgtgccggtgctggcctgcagcggcgtgttgctgtttgccgcaggctgggtgctgaaccgtcagggcaaaaaggaaaactgactttgcactcctttcttttcggcacagcgtggcgttgtgtaccgaatttgctcccccgcaagggggagcattttttgtgccctttcccctgccgggcgcagcacgattttgaatgcgctccgcgttgctctgcgcataatcagcggaaaatatattttttaatttgcaattctggaaaatctgcggattttccagaattgccttttcacgggtggggtttaggcacgaaccctctcaggcatctcgctttgctcgatgccagctcccccgaagggggagctttttgggtggagctggcgaacgcagtgagcctgagggggtacacgcaaaagagccgctgtacaaaaagtacagcggctcttgttttatgcaatctgtattaggtttttactgctgctgggcggcctttttggcctccagtgccagaatggcgtcgcggcggctcaggttgatgcggccctgctggtcgatgtcggtcaccttgaccacgatggcatcgcccacggcaaccacgtcctctacccgctccacgcgcttggtgtccagcttggagatgtgcacaaggccttccttgcccggagcgatctccacaaaggcaccaaagttcatcaggcgggtcaccttgcccttgtagatggcaccgatctcggggtcctccacaatggtcttgatggtaaagatggcgcgctttgcgtcctcctgattcacggcggagacgaacacatggccgtcctcctgcacgtcgatcttgcagttgcaggtagcgcagatatcctgaatgaccttgccgcccttaccgatcacgtccttgatcttgtcggtggggatcatcatgctgaacatcttgggtgcccagcggctcagctcctgacggggctcggcgatcaccggcttgatgatctcgtccagaatatacaggcggcccttgcggcacttctcgaaggcctcggcaatgatgtcgtaggtcaggccgtcgatcttgatgtccatctggatggcggtgatgcccttgcgggtgccgccaaccttaaagtccatatcgccgtggaagtcctccacgccctgaatgtccagcatggtcatccagcgctcgccctcggtgatcagaccgcaggagataccggcaaccggagccttgatgggcacgccagcgtccatcagtgccagcgtagagccgcagatggaagcctgagaggtagaaccgttagagctgagcacctcggacacgcagcggatggtgtaggggaactcctccaaggagggcagcaccggcaccagagcacgctcggccagtgcgccgtggccgatctcgcggcggccggggctgcgcggtgcgcgtgcctcgcccacagagtacggcgggaagttatagtggtggatatagcgcttggtctgctcgtcggtcaggtcgtccatcagctggttgtccttggtgccgcccagcgtgcaggtggtaagcacctgcgtctggccacgggtgaacataccggagccgtgcacgcggggcaggatgcccacctcagcggccagcgggcggatctcgttgatgccgcggccgtccacgcgcttgccctcatccagcagccagcggcgcaccacgaacttctgcatcttgtagcttaccagatccagatcggcggcggacaggtcggggtattcctcggcgatcttgtccatgatgggcagcagggctgcgtcacgcacgttcttgtcgtcggtgtccatagcagccttgaaatcgtccaggtacttgttctggatggcgtggaacacgtccatatccagacccaccacctggaagtcgatcttcggcttgccgcgctcggccacgattttgttgatgaactcgatgatcttcttgatctcaacgtgtgcggtcttgatggcggtcagcatggtgtcctcgtccacctcgttggcgccggcctcgatcatcacgatcttatccatagtggcggcaacggtcagagcaaggtcgctcaccttgcgctgctcctgggtggggttcagcacgatctcgccgtcaaccagacccacctgcacgccgccgatggggccgttccaggggatatcggacacggcggtcaccagagaagcgccgatcataccggcgatctcggggctgcagtccgggtcaaggctcatgacggtcatggtgatgcacacgtcattgcgcatctccttggggaacagcgggcgcatggggcggtccaccacgcggctggtcaggatagcgcgctcgccggggcggccctcacggcgcataaagctgccgggaatgcggcctgcggcgtagagcttttcctcgtactccacgttcagcgggaagaaatccacgccctcgcggggcttggggctcatgaccacgttgcacatcacgcaggtctcgccgtagcgaatcagtgcgctggcattggacaggccacacatcttgcccatttcaaccttgaacgggcggccggccagcatggtttcgtagaccttgaagttgtcaaaggtctctttgcgggaaccaaattcgattgccattgtttctgcctccttgtttttcggatcgttctatccaaaaagccgtggcgtgcgcattatagcaataaatccagcgtccctgcccgcaggcacgggcgttcgatttactgctgcaatacgctgccaccgctattttgtgcgcatgggatacatggagttatacataaagcaaagggcaggtacctttgcggtacctgccctccgttaaaattacttacgcagacccagagttgcgatcagagcacggtaacgctcgatgtccttcttctggagataagccagcagattgcggcgacggccaaccatcttcagcagaccgcggcggctgtggtgatcgttagggttcttcttcaggtgctcgttcagctcgttgatgtgagcggtcagcagagcgacctgaacctcgggggagccagtgtccttctcggtcagagcgactttggccataacttcctgcttattcataatacagtacctctttcaagtaatttatctgcctatggcacagcggcgggaaacggttctcccaaaagcgggcatactcccagccccgtaccacggtaacagatacagtataccagattgcccggcagattgcaagaagatttttgtccgcaagccttaattttttacaataccgccccagtacagctgcacctccggcagcttctttttgcgcagcagaaacacggtggggatcaggtacagcagcaccgacagaagcatggaggcatcgtagccgctcacggcttcggccaccgtggtggtgccgtacagcccgccgatgagcatggaggagatgtccattg

SEQ ID NO: 13852 - DNA, 2799 bp, Unknown
  gut microbiota DNA sequence
tcccctctcagcacaagctgagcatactccaaaggcttattgtatagcagtcagtccagctctgcccgctgtgccggggtgttgccgtattcgtcctccacggcgatgcagtcgatggcaagggtagtgccaccctcgaaccgggcttccacccggttggtgtccatgttgtagaggcaggaaagcagtttgttcataagaaagcctccatgtttttcacatttacttcttctgcggtggaaagttccggcttgtccgtttgcagattcatgaatccgctttgtgatgcagccctttgcaggtctgcacccatccaccacacgctccaattttacgctaaatgcgaacaacgctctttttgctctgcacaaaatcctacatcgtttggcgtaaaattggcgtatggcgtagttttcgctggaaatccgtcaaaagaaaaagcccgaaacttctcagtacatcaagaagtttcaggctttgttttgcttaaattgggaatttactgctcaatcggcttcatcgtggggaacagcagcacatcacggatagaggcactatcggtgagcagcatcaccagacggtctacgccgaagcccagaccgcccgtggggggcagaccgtactccagtgcgttgacgtagtcgtagtccacctgtgccttgcactcgggctccagcgccttgcgctcggccacctgacgctcgaagcggcccttctggtcgatggggtcgttcagctcgctgaaggcgttgccgtactcggtgcagtcgatgaaatactcgaagcgctcggtgaaggcgggatcatccggcttgcgcttggccagcgggctgatctccacagggtaatcgtagatgaaggtgggctggatcagcttgtcctccacaaaggcgtcgaagaactcggccagaatggcgcccttggtgggcacctcgggcagttccacgttgtgcgccttggcggcagcgatggcgtccgcatcggtctgccagtcgttgaagtccacaccggaatacttcttcacagcctccaccatggtcaggcgctcccagtggctcatatcgatctgcttgccctgatacgggatgaccagactgccgcagatcttgagagcaaggcgcttgtacagctcctccaccagatccatcatgccatggaaatccgtaaaggcctgatacagctcgatggtggtgaactccgggttatgcttggggtccatgccctcgttgcggaagatgcggcccacctcatacacgcgatccatgccgcccacgatcagacgcttgaggtacagttcggtctcgatgcgcagcaccatgtccatgttcagggtgttgtgatgggtgtagaaggggcgtgcagaagcaccgatctcgaacggggtcaggatgggggtatccacctccaaaaagcccttctcgtccagataagcgcggatctccttcaggatgcggctgcgcttgatgaaggtgtccttcacctccgggtttgcgatcaggtccacatagcgctgacggtaacgcatctcggtatcggtcaggccgtggaacttctcgggcagggggcgcaggctctttgccagcagggtcagctcagtggcgcgcacgctcagctcgccggtcttggtgcggaacacctcgcccttcacgccgataatgtcgcccacgtccagctttttaaaggcggcgtaggcctcgtcacccagctcgtcgcggcggacataaagctggatatcgcccttgtcgtcgcgcaagtgggcaaagctggccttgcccatgacgcgcttggacatcatacggcctgccagtgccaccagcttgccgctgtcggtctcgttgggcagctccttaaattcttccttcaggtcggcagaataagcgtcctgcgggaacttggtcagggtaaaggggtcgttgccggcggcctgcaggtcagccagcttctggcggcgcacctgtacctgctcgctctcggacagacccgcagcggggtttctcttttgctcttccatggttactcctacttagtttgcagaatgggtgatagccagcacagtgtactccacggtctggccggtgggcagcagcacttcgaccttttcgcccacagccttgcccatcagggcgtggcccacggggctctcatcgctgatcttaccgttgaaggcgtcagcctcggtgcggcccacgatatcgtattcctcggcttcgtcctcgccagtctcacggatggtaacgtgggtaccaacggagacgttatccacgctcagctcgctctcgtcgattataactgcgttcttgatggtctgctccagctcggtgatgcggttctccaccagaccctgcgtattcttggcctcgtcgtactcgctgttctcagacaggtcgccgtggctgcgggcttccttgatctcttcagccagctccttgcggcggacggttttgaggtattccagttcctcctgcattgccttcagaccggcagcggacatcttgatctcttgtgccatttgagaatctctccttgttattagctgtatttctttcgcgcagccacaaagccgcacaggaatgccattttgactacactattataatagcaagccggtgccttgtcaacaaaaaaggcggtgctggggcaaaaaaagcacgcagaacggaagaacggcaggggcagagccgatcaaagagtgatactttcgataattcgtgctctttttgggcatttcgcgccatttcccttccaaaatacgataaaatgtaatataatggaagtaccgcaatacataccccccccccc

SEQ ID NO: 13853 - DNA, 1732 bp, Unknown
  gut microbiota DNA sequence
taccctcctgaaatgttgatagctctattctaccacgattctccccaaagcgatagggcgaaaataaagtgtgctgccgggagatcggggatctgtgaacggcttgcagcatctttttacagaaagttcatgtaaaaacgggctaaaatagccttgcagatttgacgtgtctgccgctttggtgtatcatatacttgtattgttatgcgcgattccgggcgcatcacagcccgatttttaagatttatgaggtgtgacctatgtcccttgttgaaaaactttttggcagcttctctgaccgggagctgaaaaaggtgaaccccatcaccaaacaggtgctggcactggagcccaagtatcaggccatgtccgatgccgacttacaggcgcagactgccgtgttcaagcagcagctggccgagggcaaaacgctggacgacattctgccggatgcctttgccgtctgccgcgaggccgcatggcgtgtgctgggcatgaagcacttcccggtacaggtgaccggcggtattgccctgcaccgcggcgatattgccgagatgcagaccggtgagggcaagacccttgtggctaccctgcccgcctatctgaacgccctgaccggcgaaggggtgcacatcgttaccgtcaacgactatctggccaagcgcgacagcgagtggatgggcaagctctaccgctggctggggctgaccgtgggtctgatcgtgcagggcatggacggcgacgcccgccgggccgcctacaatgccgatatcacctacggcaccaacaatgagttcggctttgactacctgcgcgacaacatggtgacctacaaggccaacatggtacagcgcggccacgcctacgccatcgtggacgaggtggactccatcctgatcgatgaagcccgcacccccctgatcatctccggccgcggcgaggactcctccagcctgtatacccaggtggaccgctttgtacgcaccctgcacaagagcgtggtggtggagctggaagataaggtctccaccgatgagcaggccgatggcgattacgttgtggacgaaaagcacaagacctgtaccctgaccgccgccggcatcaaaaaggccgaggcctattttaaggtggagaaccttgccgccgccgagaacatgacccttgcccaccacatcgatcaggccatcaaggcttacggcgtgatgcagcgggatatcgactatgtggtcaaggatggtcaggtcatcatcgtggacgagttcaccggacgtctgatgatcggccgccggtacaacgagggtctgcatcaggccatcgaggccaaggagggcgtgaagatcgccgccgagagcaagacgctggccaccatcaccttccagaactacttccgtatgtacaaaaagctgtccggtatgaccggtactgcccgcaccgaagccaccgagtttaccgagatctacggcctgaacatcgtcagcgtgcccaccaaccgcccggtgcagcgcaaggactacccggacgccatctacaagaccgtggagggcaagtaccgcgccgtcatcgagcaggtaatggagtgccacaagaacggtcagcctgtgctggtgggtactgtcagcgtggaaaagagcgagatcctcgccaaaatgttacagcgccatacccgggatttcaacgtgctgaacgccaagaaccacgagcgcgaggccgagatcgtggcgcaggccgg

SEQ ID NO: 13854 - DNA, 6191 bp, Unknown
  gut microbiota DNA sequence
ctgcgctcgccagctcccccaagaggggcgcatttcccacgttcacacttcttttaccagtctgttactttccgttttatgcggtttgtggtatactatggtcaacatgggtcaccatggctacattgaaacagacaggatgtgaaatcctcttatgaaagatggttttttaaaggcagctgccttttcgcccgctttgcgggtggcagactgcacctataacgcgcagcaggtgctggcgcagctgcaaactgccgcgcagcggggggtaaagctggcggttttcccggagttttgccttaccggctacacctgcggcgacctgtttttgcagcgcaccttgcagcagggcgcactggatgcactggagtggctgcttgcgcagacccgcgcactggacaccgtagtgctggtgggcttgccgctgctggtgcacggcaagctgtacaactgcgctgccgtgctgtgccgcgggcagctgctgggcattgtgcccaagacctacctgcccaactacggcgaattctacgaaaagcggcagttcacccccggcagcaccgaggtgcagacggtgaccgtctgcgggcagcaggtgccctttggtacgtcactgctgttccgctgccgccagatgcccagctttgtgctgggcgtggagctgtgcgaggacttgtggagcgccctgccgccctccaccttccgtgcgctggcgggtgcgaccgtcattgcaaacctttctgccagcgatgagaccgtgggcaaggccgagtaccgccgcgcactggtggcaaaccagtctgcccggctgctgtgcggctacctgtacgcctcggcagggcacggcgaaagcaccaccgacatggtgtttgccgggcatgacctcatcgccgaggacggcagcatccttgccgagactgcgccctttgcgggcgaccacgccgagaccgagctggactgccagcgcatggaggccgagcgtgcccgcaataccagctttgagcacactgccgagggctacatcacggtggaatttgaccttacaccggaggaaacggtgctcacccgccgcattgaccccgcaccctttgtgcccggtgacccgcagcgccgcgccgcccgctgcgagctgattttgaagatgcaggctgatggccttgccaagcggttggagcacgcccacgcaaaaacagcggtcattggcatttccggcggcttggacagctgccttgctctgctggtggcagtgcgcgccatgaagcagctgcaccgctccgccgccgatgtgctggcggtgaccatgccctgctttggcaccaccaagcgcacccgcagcaatgccgaaattctgtgcggggagctgggcgtaagctttcaggaaattcgcatcgccgacaccgtgcgcagccactttgcggatatcgggcaggacgagactgtgctggatgtcacctttgaaaacgggcaggcacgggtgcgcacgctggagctgatggacctcgccaaccgcaccggcggccttgtggtgggcacgggcgacctttcggagctggcgctgggctgggcgacctacaacggcgaccacatgagcatgtacggcgtgaatgccggtgtgcccaaaacgctggtgcgctatctggtgcagtacgaagctgagactgctgccaccgctgctttgcacgatgtgctgctggatattcttgataccccggtgtcgccggagctgctgcccgccaaggacggcgagatcgcacagatcaccgaggacttggtgggcccctacgagctgcacgatttttacctgtattatgtactgcgctgcggttttggcccggcaaagatctaccggctggcaaaggcggcctttgcaggcagagcagagtacacggatgccgtgctgtacaagtggctgcgcaacttctactggcgcttttttgctcagcagttcaagcgcagctgcctgccggacggccccaaggtgggcagcgtgaccctttcgccccggggcgactggcgcatgcccagcgatgcctgcgccaccctttggctggcagagctggagcagctcaaacccggggagcagtaagccatgaagaacaaaaagcttttgaccaatatcctgtttgcagtggtagtgctggccatcgcagcggtgctgctggctgtgcgcagccacaacgccaccggcggaaaactgactgcccagctgatttacggcgacgcgaacgccgtgctggacattccgctggaaaaggacgaaacttacagtgtggacaccggttattatacggtgcatatagaggtaaaggacggcagggcgcggtttattgaatcgccctgcccagatcacatctgcgagggctttggctggctgtcggcggaggatcagaccgccacctgcctgcctgcccgcgccgtgctgaccatcgttccggtgggctgaaaaaaggagtattctcatgttggacgaaaacgagcattcccgcaaggaggacgggcgttccctgcaccgtcttttgcacaaggctgagcagcaggacgctactgtagtggtggacagcgccgcgtttttctcggagctgccgccggagcaggctgcgccgccccgccgcccgcagcaaaacacccgccgcaacactgctggcggggagaatggggcgtaccagcccccgaaacgagggaagatcttgctgatcgtacaggcaattttaagcgttctggcgctggtgcagctgtggcgcacccagatgctgccggtgctgtatctggtggtgctggcggcgctgctggtgctgctgtggctgctggtcaagcgctgtcaggagtacaaaactgcaggcacagtgtcccgggtgttctcggtggtgctgtgcgccgccatggcggtgggctgcgtgtgggcgcagcagggcctcgacgcgctgggcaatatgaccaacggttttttgagcaacgccgaggccaataagatcaccaaagagccttttgtgctgtacttgagtggcgtggacacccgcggcgatctgacggaaaaagcgcgcagtgatgtgaatatcattgccgcagtgaaccccgttaccaagcaggtggtgctgatcaacaccccgcgcgattattatgtggaccttgccggaacaaacagcaaggataagctgacccacgccgggctttacggtgtgcagaccagcatggacaccctcggcaacctgtacggtgtgaacgtggagcactatatccgcatcaattttgcagggtttatcgacattgttgatgcgctgggcggtgtggacgtgtattccgatcaggcgttcacctcggtgggcagccccggttactacgaccccaccacctttgtggagggctggaaccatctggatggtaaggctgcgctggcttttgcccgcgagcgccacgctttcaagaccggcgatgtgcagcgcggcatcaaccagatgaaggtgatcgacgccatgctgaacaagatcaagtccccggcgctgctgatgggctttaccaaaattctggacgctgttgctgacagctttgtcaccagcctttctaccaaccagatcagcgcgctggtgcgcatgcagctgagcgattttgcggagtggaatattgaacgctacaccgttactggcacttccggcagcagcaccaagtgctactctgccaaggggcagaagctctatgtcatgaagccggatgaagcctctgtggcaaaggccaaagagatgatcgcggcggtgatgggcggcgaaggcacggtaagttccaccacccagaccccggaaaagacggaggtgtacacccccaccaccgaccccgatgccgccgtctctgtgcccgagacgcctgccgacagcgtgatcgtggaagtaccggcggaaagcgtgccggagcaggctgcagagcagcccgctgagcagccggcagagcagcccgcggaaacgcccgccgagcagcctgctgccaccgagacgccccagccggaaacgactgctcccgccgagggcggcaacaccgagacgcccgccgtcagcctgcccacgcaggagcaggtagagcaggccgcaggttcgctgtacagcgccgcctccaccgtgctggacgccatcctgggcgcaagcgggaactgagcaacccctttccgtgaaaaggcaacccgggaaaatccgcagattttcccgggttgcaattaaaaatgattatgccgctgaaaatgcccaaagcgcacgcagcgggcattttcaatagtcttgcatgcaacaaagaggtcactgcacaaatcctgtgcggtggcctctttttacgttgctgcaacaaaaaagctgcctgcaacagcagacagcgcaaaaacacaaaagggaaaacgagatagaccgtaagccgggttctgtattaaacgacgatctgtctaggcctgccattgctgacaggctcgtgccgccttcgggacacgcgagcagcgctgtacgtcccatataggcgttgcttccggtagggtttacaaagccgcatggtcacccatgcgctggtgagctcttacctcgccgtttcatccttaccgcattgctgcggcggtttgttttctgttgcactttccctaaggtcaccctcggctgccgttagcagttaccgtgctctgtgaggcccggactttcctcagagcggtcaaagccgccccgccgccgtatgttccactcgttttccgttcctcatgataccataaaaaagtaagatttgcaagtgaaacggatttttgttataataacatttgtgtttttgtgaattttgcagggggagggcaggccatgcagctgtattttgccgtgccggatacggccaccacccacgatggggtgctggtgcgcagctttctgcgccagtgtgccgtctctacggatcttgcccgggcggtcaagttccggggcggcggcttttttgcggacggcgtgcctgtgttggcaaaccggcgcatctaccccgggcagatgctctcctttgccctgccgccggagggggatggcgtgaccccgcagccggagatcccggtcaacgtggtctacgaggatgcctttgcggtggtgctggaaaagccgccgcagctggcggtgcaccccaccctgaactaccccggaggcacattggccaacggctacgcggcgtgggcggctgcccacggccacagcccggttttccgcccggtgaaccgcatcgataaggacaccagcggccttgtactggcggccaaaaacgcctacgccgcgccgctgttggcgggcggagtgacaaagctgtattatgccatcgcgcagggcgcgctgccgctgggggaaggagcaatcgatgcacccatcggccgccggggcgatagcatcatcgggcgctgcgttacccccgagggcaagcccagccgcaccgagtatactattataagggaagaaaacggccttagccttgcagcctgcgtgccggtgaccgggcgcacccatcagatccgggtgcactttgcgtccatcggccatcctcttgccggggatgatctttacggcggcagccgggagcgcattgcccggcaggcgctgcactgcgccaggcaaagctttgccgtgcctgtatacaccccgctgccggatggcatccgggtggaaatgcctttgcagctgcgcaccgtcacggtggaaagcccgctgccgccggatatggaagcgctcttttcgtgaaaactgcgtgaaaaaatagccaaattttatgtaagcgcttgtttcaaaccatgcaaagtgtataataaaaagagagcgtattgtgtacaggccctgttggccttttgaacaggggaacgtacaccatctagctgttgtgttccgggccggaaaaatgccctgcagcagcgcaggaaggagaaaaatcccgttgactgaagataaaataaaggagcagcagcctgctgcgcagcctgtacggcagccccgccgccagaagctgcgctcgctgtgggcgcagttccaatgccggggcgtgctgcggcggcacaggattcgccgcaagcgtcagcaccgctgggaaaagctgtggcacaagctgctgcacaatcccatagcacctatggtgggcgagacgctgtacgccatcggcttttccgccgagtatgccgtggtccgtacaggacgccgcttgcagcatgggctgcg

SEQ ID NO: 13855 - DNA, 20430 bp, Unknown
  gut microbiota DNA sequence
tcacttcccttgacaagagacaaaaagacaccctttcgggtgtcttttttgtatttcaagggcttttattccccatcctctgcgggcagctggttccacaggcggtagtagacgccctgcttttccagcagctgggcgtgggtaccctcttccacgatgccctcctcgcccagcacaaggatacggtcgtagtccttgatggtggtcaggcggtgggcgatggtcagggtggtgcggccgtgcgccagcttttcaaggctctgtcccacaaggatctcactctcgttgtccagtgcgctggtggcttcgtccagaatcaggatgggcgggttcttcaaaaatacccgggcaatggcgatgcgctgcttctgtccgccggacagcttgacgccgcgctcgcccacataggtgtcgtagccgtccttcagcgcaaggatgaacttttccgcgcccgccagacgggcggcggcttcgatctcctgccgggtagcaccgggcttgccgtaggcgatgttctgcgccaccgtgccgctgaacaggtacacgtcctgctgcacgatgccgatatcctgccgcaggctcttcagggtgacccggcggatgtcctgcccgtcaatgaggatgcggccgctggtcacctcgtaaaagcgggggatcaggttgcacagggtggtcttgccgccgccggaggcacccaccagcgccagacgctctccggcgcggatgtccagactgacgtcgtgcagcaccttgttgtggtcgtccgggtactcaaagcataccttctcgaaccggatctcgccggggccgggctgcaatggcacggcgtccggggcgtccttgatggccaccggggtgtccatgatctcggcaaagcgctcgatgccggtcatgccgcgctggaactgctcggcaaactccacgatgcgccggatggtggcgataagggtggtgacgtagagcatataggccacaaggtcgccggcggtgatcttgccgtacaccagcgacagcccgcccgccagaatgaccaccagatacatcaacccgtcaaacaggcgggtggaggtgttgaacgcgcccatggcgtagtagccaagggtcttgatctgctcaaaggcgcggttgcccctggcaaacttttcccgctcctcgtcctcggcggcaaaggccttgaccacgccctgtcccagcaggctgtcctcgatggtggagttcagctcgccgatctggacgcgctgctggcgaaaccgcgcccgcagacggccgttcaggtacaccgacaccacgcccatcagcggcacacaggcaaacactgccaaggtcagcgggatgctggcgcggcacaaaatgacaaaggacgccacgattttgatgcccgcaatgaaaaattcctccgggcagtggtgggcgaactcggtcacatcgaacaaatcgttggtgatgcgccccatgatggtgcccaccttagtgttgttgtagtaggtgtgatccagctgcaaaagatggtcaaaggcatcccggcgcatatccgtttcgatatgcacgcccatgatgtggccgatgctggacatatagtagctggctgcgccatcgatgatgcgcagcacaaagtagagtgccgccagcttcagcacgatgcctgccgtcagggtgatgcccacccccatggcagagttggtgataatgctcatgatcttgggcagcacgatatcgcacagggtggtcagtgctgcgcagaacagatcaaggcacagcaccatcttatagtttgccagatacggcagaaaacgccggatcagcgcaccgctgcttgcgtggtgcgccccggggtcgttggttttggttttcggcatggttcctccgtttttatcgttactttttgctgtaatcccgtgcgccgtagatggcggtaccgatgcgcacaagggtagcgccctcccggatagcgttctcaaaatcgccgctcatgcccatggaaagggtctgcatctccacattgtggtagccccgctcccctgcccggacgaacagctgatacacctgcgccagataccggcggttctgggcatcgtcatcgttcacgggcgggattgccatcagacccttgacccggatatgctgttgtgcagcggcggtatccagcagcggccagagcagctccggcgcagcgccggtcttgctctcttccccgccgatgttcacttccagcaaaatgtcctgcacgatgccggccttggcggcttccttctcgatggccagcagcagatgctcactgtccacgctctggatcaggcttgcccgccccagcacctttttgatcttattggtctgcaaatggccgataaaatggctgggcttgccgcagtaagctccggcatcgtagtttgcgcacagttcctgcacatggttctcgccaaacacatcaatgggcaaagccgcactggctgcaatggtctgcgccgtgcgggtcttgcaggcggcgcacagctgcaccgctgccgggtcacgcccggcttcccgggcggcggctaccatcttttcccggatctcggccacggcctgccgcatctcttccaacgttttttctgccatctggctcagtcctcctcggtatagcgggcacgctcgccgccgatcagtttcgggcgggtgtaggcacacagaatgtttgcttcgccgatcttattaaggctcagccgcaccggcactgccacccgcttcagatgcatcccgatcagggtgccgccgatatccatgcccgcgttggcgcggatctcctccaccgccaccgggtctttgaagtttttccagcaggtagtggcccagctgccgcccgcatggggacggggcacgacgcacacttcctcccagccgtatttttctgcggcttcccgctcaaggataagggcgcggttcaggtgctcgcagcactgggctgccagccagatgcctttttccgccagcaccggcgcagcgcccgcgtacagcgcccgggcggcttctatgctggaatccttgccgatgtgaccgcccaccatctcactggaagagcagcccaccacgagcacatctccctttttcagctttgccgcagccaccagctcggtcatagcctgccgtgcctcggtctcgatctgttttgcaaatgcttcggtcatacaaaaaacacctcacttatcggtttgcagccagcaggctgtctgcccctgccgcaccgaaatatactttgctttccaccggacacaccgccgcacagctgtcctgtacaagaccggtaaaggtctgctcccaagcccctgttgcaaggcttaccgcctcggcgcagggggcatctgcggtgcaccggaacagccgctcctgcgtattctgccccgcccgcagggcaatgccccgcagcagggtgctgtccgcgttcttttccagccagccgctgcgcgcccagcggtagctgatgtacagcgtgccgtccgtgtccacagccagcgctccgggatagcccggcagaccggcaaaggcagcggtgcagccccgtcccccggcggtcagctcccgggcagcggcgtccaccgcccaaatgcagcggctgccaaggtcggagacatacagggtgctgccgtccgggctgagcgccagaccggcagcacctgccaccccgcccagcaccttttccactgtgcgggcggcggggtcgtacacatacacgcagccagtggcggtgtgcgccagcagctcggtgcgcagagcgctttccagcccgttctccgcgcctgccgccgctgccactgcaaagtacaccttacccgccgggcttacctccacggcagataccgcccccagcggcgcaccgtccagctgggtgaccacctgctccaccgccgcaccccagctgtcgtgctttgcacggcagagggtacccccagcggtggtcagctgggtcagccacacatccccggcggcatcaaaggcaaagccggtcagctcgccctccacgctcaggatggcggcagcgtgcccgccatcggtgcgcacaaggtcgctggtgcgttttttcagcgcagcaccgttccatgcggcggcatacaacaggccgtccttggcgcggatgcagtccacgccctgatactcccccagctccagccgggtcttgcggtcggtggaaacggccgtctgcatcgcgcccgtctcctgccggaggtcgggggctttatagatctgcggcggggtgtcgatggggcggaagcccagcgcgtacaccagcaccagcaaaatgcccaccccgaacacggtgctggcggtgcggaaccgcttgagcatggcgtcccgttctgcggccatctgggcggcatactctgcccggcggcgcgccgccatggcgttggcgcggttggcacgccgcatccaccggtccacgaacaaggccacccgcggccctaccgtgagggacgcaatggccagtatgagcaaaaattcgatcagtccgattcgcataagcgcttttccttatctccgaaaaacctgcggacagcgcactgtcctttatcgctaaagtatagcattcctgcgcaaaaagggcaagcgggacaaaaaagaactgccgcacagcgttgtgcagcagttcttctaagaacaacgatttcaaatggcctccgcgttgctctggccatgcgcagcggaatgatttttttaaatttgagtgttcatcgcggcctgcgggccgcgatgaacacatttttacgagaaggggattctcatcttatctcgattggccgggtggtctgctccccgctgcgggtcacgagggaaccggcgggcacctcgccccggataacgcagcccgcgccgatgacgcagttgtccccgatgtccgtgcccttgagcagcaccacgtctgaggcgatccagcagctgcgccccacagtgatgcagcccgccgtgcattcccggctgaccccttcctcccggctgaagcggtggttgttatcaaagatcttcaccccggggccgaaaagggtgttttcgccgatgtcgatctttccaaggcagctgatgaccgcgccatcgttgaagtagaccccgctgccgatgttcagctggctggaatatccggtggtgatggacatccgcccgtcgctctccacccggtcgcccagcgtcacccgggagccgctgttcagccgcagccggagttccctgtccagcaggatgctgctgccaaattgcagtccccggcagccgaaccattttttccattgcaggcggcagcggttatgcaggctgcgccgtttttcccgcagccagcggggcgaacactgccgcagccacatacaccagcgcccgactttggtgcacttgaagcgcttgcgccagcggtttgccttatcgccgctttgccagctgccactgtaatagtggatgccgaaggtgcgcggtgtccggtgcatccgctcggtcacataatcaaaaggcgaaaagcagtcggtgggcagcaccagaaagccgtccagttcctgctgctcgtctttctgctgcaaaccggccttggtaaacagcggggtatcccgctgggtgcaggtgcacagatccggctcgccggtctcctgcagaaaggatgcattgcggtagcctgccagcattttgccgatcatctcgcagcccggctctgcgcccacgccggagccggtattcaccagcagcgtgcggccgtagggcgagggcacactgtgctccatgccgataaagcccttgtgctccagcagttcatccagcgggcgcaccagctccacgtccgtgtccagatagatgccgccgtactcatacagcactgccagccgcacatagtccgacacaaaggcatatttctttgcttcgtaggcctgctgcgcgtagcggttttggctgatctcaaagttctgctcgttccattcgatgatcttgtaatccgggcagtattttttccagctttcgatacatttccggctctccgggttgatgggcccgccgccgaaccagcagtagtggatgatcttggggatgctcatgcctgtttctcctgttttgtcgcaagtgctctgctctctacgaccttattttacgaaaggccctgttttcttgtcaagtttccccggcgcattttgccgcgtattcccgcaaaaagattgccgccccgccgcccggtgtggtatactgggtgcagacggttttgtttttccaaagcattcacttaaaattcacagctttttccaattcttgctttagaatagagttgtatattgaactatgataggaggagtcctgttttatggcaaagatcctgatcgttgatgatgagccccgcatccgggagctgatccacgagcatctgcaatatgccgggtatatctgcgaggaagccggggacggctctgcggcgctggcacagctgtccggcggcgggtttgatctggtgatcttagacctgatgatgccctttatggacggcatgacctgcctgcgggagatgcgcgcccgccacatcaacaccccggtcatcatcctgaccgcccggggcgaggaatacgacaagcttgccgggctggaaagcggcgcggacgactatgtggtaaagcccttctccccccgggagcttgtggcgcgggtgcgcgcagtgctgaaccgcaccatgccccgccccaccgaggccgccgataccatgacctttggcgaattgaccatcgacaccgccagccataccgtgcgggtgtccggcgaggaagtcgccctgacccccaaggagtttgacctgctggtatttctggcctccaacaagggcattgccctgagccgggaaaagatcctgcagaaggtgtggaactacgactacttcggcgaggaccgcaccgtggacacccatgtgaagatgctgcgcggccatctgggcaaatgccgcagctacattgctacggtatggggcatcggctataagttcgaccccgatgccgcccgttgactgaaggagcgtgcggagcatgcggcaaaccaccaaagcacggcatacccttggcatccgcgggcagctgatgtggtttttgtgcttcatctgcctgtttctgctggggttgttctggttgctgtccacccagctgctggagcccttgtacaccaaacacatcgagacccagcttaccaatcaggccgacagcatcgtggagcggctggacgatgccattgccgagggcaaggtgctgtccagctggtcttttgggcagcttgcggtcaacagtgatttttttgataagctcacgctggaactgtacaccaaaggctctttgaacagcttctgcgtggatatctcggacaccaccctgcacaccatttataagatcgagaaccagtccttctgcaacctgcacggcacctatctttcagactctgccaacaacgataagatcattgccactgcccttgccatgcgccgcaagtgccgcagcgtgggcagctttgtgcagacgctcaacccgccccgactctccggctcggcgcagctattggtagggcgcattaccgccgacggcagctataccgtgctggtgaccaccagccttgtgcacgttaccgaggccggcaaggtgctcagcaccctgctgccgctggcggcggcgctgatcttcggctttgccatgtcggcggcgtggctgttcagcgagtggttcacaaagccgctgcgccagctttccagcgccgcgcggcagatggcgctgggcaactacgccgtgcaggtggacaaccgccgcaacgacgagctgggcgaccttgcccgggactttaaccacatggccgaggaggtgcagcacgcggtgcagatgcagcgcgatctgctggccaacgtctcccacgacctgcgcaccccgctgaccctcatcaagggctatgccgagacggtgcgcgatctgaccggcgacgataaagcccaccgggacgagcagatgaacatcatcgtggacgaggccgaccgcctgaccgcgctggtctccagcgtgatggagctgagcaaggtgaccagcggcacctataagtgtgagcgggtgcactttgacatggggcagctgtgcgacgaggtgagcgagcgctacgacgccatctgcgcccagaacggctggcagctgcagctggaactgccggaggaggaactgccggtctacgccgacccggacatgatgcagcgcgcgctgcacaatttgctgggcaacgccatgcaccacatcggccaggacggcatttttatcctgcgcgccttccgctgctctgagggcgtgcgggtagaggtggaggatcatggcccgggcattgccgccgccgacctgccctatatctttgaccggtactaccgctcccgctcggacgcgggcaagcagggcaccggtctggggctttccatcaccaaagccatcttccagcagcacagcttccgcttcggcgtccaaagcaccgtaggcaagggcaccaccttctggttcgtcatgagcgatctgccctatgtggacgactttgagggcaagtgagcaccccctgtgatacagaaaaagcaccggcagctttccagatcttccaatcgggaaactgccggtgcttttattatgttccgctctctgccgtatggtaaatgccaaaggtgttgtccggggcgggcatctccacccgggaagcacggtcgttcaccgcccacatcatcgcgcccatggcgcccagcaccaccaaaataatgagccattttactgcattgggtaattttttcattccgttatcctttccatagtctccatgcggcacttctgccgggcagtgcgcagcagcacagcggcctcggcagccgaaagcgcctgcacccacccggggcgctctcctgcgcctgcgccggtgctgcctgcctcagcaaagccggccagcgccgtgtcggtgcggtcgttccagccggcaaaaccctccggcgcaatgtgcgacccaaggcggcagtccagcaccgccgttttgccggtaggccgccacggtctgcccagatacacgctgcccgccgggcagtccgagacaaaatcgcagtcccagaacacaaagcccagcccctgtgccgcgccggaaggcgcggtgacccagctgtgcgcaagaccgttgtccaccgtgcgcagggtgcagtgctcaaacagggcgtctgccccgccaaagataaaatcaatgtccccggcgatctcgcaggcgtggtaatactgcgcgcttgcccggcggggtgccagcccacgcgggcccagaaagccgtccttctcccgctctttctccggcagaggggcgcagaacagggtatcctgattgcccagcagccgcacacggtcaaacgccgcccgggcgctgtccacataggccgcgaccgcctgcccgacctttgcgccggggcctgcatcgttctcgatggtcatatcctccacccgcagcttctccccgctgaaaaaggcggtatagctgcggaaggtgtgggtgggccgtccgtccgggtgcggcagcttgccgccatcgttccataccagccgggtggcatccatgcccgcgcccgcaagggtgatatcctttttctcacaaaccagcttttcccggtaaatgcccggcgcgatgcggatgaccgcggggcagtcgtagggcaccgccagcaccgcctcggaaatggtggtaaactgtccgctgccgtcgggtgcaacgttgatggtaagcataagccgcctcctgcgcccggcgctgccgggctgaaaaatatgcttccagtatacccctccttcccgcaaattgcaacggaaactctgccgccgttatccgctcttttccagccggagcacggcggcggtgatatcgtccgggcggccggtcttttgcgcgcggatgcgggcggtctgtaccagcgtctcggccagcttttccggcgcgtctcccgccgccgccgaaagctccacctgcttcgccacccagcccgcgccatccaccagtaagccgtccgataccagcaccgcgtagtccccggcggtcaggtgcaccacccggctctgcccgttcactccgcccagcacccccatgggcagggtggcttcgcccacagcccgcacccgcccgccgtgcaccagaaaccccggggcagctccggccttgaacagccgcgccgtgccggtgtataagtccacgctgatgaggtccagcgttgcgccgctctcgtcctcgcttttcagcgccagcgccacgttcaccagccgtgccgccagttcggcggtaaagcccgccttgagcagccgggcggtcaactctgccgccagattgccgtccactgccgccgggcgtccggtgcccatgccgtcacataggatcatctgcgccgccgtagggctgcaaaattgctgcactgcatcgccggaaacctcgccccgggcggctgcgcttgccgcaccgaacaccgcccgcagcgccggtctttcgctgaacagcagggtggtcatgcccttgcaggagagcacctgcggcacctccagtgtgcggcggcagatgtgccccacctcccccgccagcgctgccagctcctgcggggtgaaccgggtgcgcggcagggtgacggcggcatgggtgcggccaaggtcgtccagcgtgacggcgcactcctgcggcggcgcacccagcccggtgaagaactccgccacccggctggatttatagggctccgggtcgccggggcgtcccagctgctcgctgagcaccccaagtgcttcggctacggcgctgtactgctcggtcagggcggtgcgcatggcttcggaatggatgcgcgcttccttgcggctgcggtacagcgcaaagctgcgccccgccgccgcgcacagcgccgccggatggatgcagcgggacaattccccgggcaactgcgcggtctccacgctgccattctgttccagcagcggacgcagcgcttccatgcccgccatggtggcagtatattcctgcttccagcaggtctcccgccgcccgcagttaaaacaaagagtatcatgtacattgtctatgacccagcggaaaccctcccgccgccggggcagcccctcgtagaccgcgttcaccgtctccgccaatgaggaaaggctctgtgccacggcttccagccgggtggaggccgccgcactgcgggcgggcgcgggagcgttttccccgctctgcggggtgtctgctgccggggcaagccagccgccgggcagcagacagaccaccgccataccgccgcaggcgctgaacagcagcccaaaggcgtttccgggcggctgcacgcagagcaccccggatacgcagccgcccgcgtaggcggcaagggtctccacccgccgtccgggtgccagcaccgccgccgctgccgtggcacagccaagccccgctgccgccggggcaagggcggggtctgcggcgcaaagagctgcccccagcaccgcgctgccgctcagggcggcaaacttctgtgcccggcagcacagcgccagctctgcggcggcacacgccagcaccccgggcgaaaaccacccccaccgcacactgcccagcgccgccgccacagctgcgcccaccagcagcgtgcccatgcccgggcgctccggggcaaatctacgcagcccaaagccgatgcccgccgcaagcagggcgtctgccgcactgtacaataaaaggtctgccccgccgctgctgcccagcgcaaagcacagcgccatgccggtcaatgtgccgcagcccgccagcgcggcgggtacaaacttttgcggcagcagccagcgggctgccacggcagcgcccagcgcacacagctgacacaggctgcgcagcgagagcgcacccagcccgtggagcagcagccccagcgccgcccctgccgcgcagggcgcaaaacaatcctctgccagcccaagggtcagccccagcccaaagggcatcagcgccccgtacagcactgcccagccgcctgcaaagccgatgcccaccgctgccagccgccgcgccgccgggcgcagcatcgcccgtgccgctaagggcgaaggctgcaagcaccgcccgtccgaagataaaacacccatccgctctgtcataaaaatcccccgctttccggcggggatttttgttctgttccccgcactgtctgcatatactgtaacgcggggcagcggcgctttttggcgcggtgcatagaaccgccccaaacccgcccaaagacgcaaaaaagccctgcggccgtcattttgccgcagggctttgggggtattttcaactgttcagcagaaatagcggatctcgccaaaaaaggctgtccatttttcgatcacttccccgctgcgcgcttcaataactgccataatgttgcgcagcacccggggcgggatctgagagttattattgcacaggtagcagccacccgccttggtgatccagatcttggtggcgttgctgttgggtgccccctgtgcaacgtgcacatggattggctccagcggttcgttctcattggcccagaagtagacccagtaggagccaaccttaaaaacctgcggcattttccacgcctccttcttgggagaactgcaagatcagatgcgcggtggactccacgattttctgataccgcgcgatctcctccggcgtgaaaccgtgcacctcctgccagtcatagcccggcagccagcacactgctgagtggaaacaatcttctgcatccggtttttcaaggtacaccttcacccggccatcgggcttcatctcggaatgcacgatttcggtatcgtcgtccaatgtcataaacgggtacatcataggttccacctcccagatcactgtacttatatcacttaaccgttcagctttgcaatggcatcctgcacgcgctgcagggtcttttcgcggcccatcatgcaggcaaggtcggtgccgccgccgggggtgcgctgcttgccggaaagggcaatgcccagcgggtagagcagccagccgttctttttgcccagctcctctgccttggccttgcaggcatcgaacacggcatcgcggtttgcaaaatccagagcctcgtcgctcagcaccggcagcagggcttccagtgcttcttttgcagtctccggggtggtcttttgctttttgttggcgtacaggctcacgtcgtactccggcatggcgtcaaagaaatccagctgctcggggatctcgcccagcacctcgcaccggggctgcaggtttgcgcacagcagctttttgtcgatggcgctgtgcacggcgctgtcgatccacggctcggcctttttctggaattcctcggggctgaggcggcggatatactccgcattgatggcgcgcagcttgagggggtcgaagatggcgggagacttggagatgccctccggggaccagatcttgaccagctccggcagggagaagatctcctgctcggcgtactcgccgcgggggctccagcccagcaggcagatatagttcagcaccgcctcggtcaggtagccctttgccaccagatcctgatagctggcatcgccgttgcgcttggacagcttgttctgggcgtccttcatcaccggcgggcagtggatataggtggggatgtcccagccaaaggcctgatacagcaggttatacttgggggtggaggacaggtactcgctgccgcggatgacgtgggtaatgcccatcaggtggtcgtccacaacgttggcaaagttgtaggtgggcatcccgtcggtcttgatgaggatctggtcgtccatctcgctgttgttcacctcgatgtggccgtacaccacatcgtcaaagccggtcacgccctcgcgggggatcttctggcggatgacgtaaggctcgcctgcggcaaggcgcttttccacttcctccttgggcagctctcggcagcagccgtcgtagtgggtcatctcaccggcagcgcgctgctcggcgtgcagagcctccagccgctcctcggtgcagaagcagtaataggctttgccctctgccaccagctgctcggcatactgcttgaacatgcccatgcgctcgctctgcacataggggcccacggggccgccgatatccgggccctcgtcccacagaaggccggtctcccgcagggtgttgtagatgacatccacagcgccctccacatagcggccctgatcggtatcctcaatgcgcaggatgaaggtgccatcctcgtgcttggccatcaggtaggtgtacagggcagtacgcaggttgccaacgtgcatataacccgtgggcgagggtgcaaaacgggtgcggactttattgctcggcatagaaaaacgctcctttattctcatgcaaaaaatttgcggatagctatgttttattgtacttattctgcgcagatttgtcaatgcgggataataccatgcacccatgcaaaaaggggctgctgcatcaaacgatgtgcagcagcccttttgcgtaatattattctccgtccttcgggtcatccagatgctcgcgccgtttgcgtgtcaatgcggcgcacagttgcagcaatgcaaagcacaggatgccggtaaaaacaccggcaaaaacagcaccgacccagtatccataggaaaaaccgcagatcagcgtaaccgccaccgcagccaccagagaatacacggcattggccggggccgtatccgaaaggtggcgatcccacagaccattgcgcagacacgcgacaaccatatagatacagccgatcatgaatacgacccactctccggcagccttgtccgcagccccgaacatcatctgcacgatccacgccgccagaaggctgccccacagcagccagaagccatggctttcaattttgcgcatggtctgctcctgcatctcgtccaactggtttttcttgctgtatagtgaaaatttcatagttcattcctcccagaacagttcatccagtgtcttatccagaattttacagatactgcggcaaaggttgatggtggggttgtactctcctttttcaatggcgttgatagtctggcgcgaaacgcctgccgcttcggcaagcgcgccttgcgtcatatccttttccgcacgggcggcctttaatttcaggttcttcggcattgatacgctcctttcctgccgggtcggcatttgttttatcctctggacatatagtagcatttactattctaaatgtcaagtatatattacaaaaagtttttatgagcagacaaaaagcaccccagctgttttcagccggggtgctttgcggttatgattatttcagcacgacttcgccgttttcatcggcatccaccacaagggtgccgccggatgccagcgtgccgtcgatcaggcgctcggcggcggggtcctccaccgccttgcggatggtgcggcgcaaatcgcgtgcgccgaagcgcccgccctgactcttttgcaccagtgccttgagcgctgccggggtgtagctgtaagcgatgcccttggcttccatgccgggcttgtactcgtccagcatcagggcggcgatgccctgcagggtctcctcggtcaggggcttgaaggcgatcacttcgtccacgcggccaaggaactccgggcgcaggaactgtgccagcgccttgcgggtcttttcctcgctgcgctgggcgtcgctcttgttaaagccaaggctgcccgcgctctggtcgctgctgccggcgttggaggtcatgcagatgaccgtgttggagaaatccaccgtgcgtccctgcgcatcgttgatcttgccctcgtccagaatttgcagcagaatgttcatcacgtccgggtgtgccttttcaatctcgtcgaacagcaccacgctgtacgggcggcggcgcaccttctcggtgagctgaccggcttcctcgtagcccacatagcccggaggagagccaatcatacgggacaccgcgtatttttccatgtactcgctcatgtccagacggatgagcgggtcggggccgtcgaacagctgttctgccagctgcttgaccagctcggtcttgcccacgccggtggggcccacaaagatgaagcttgcgggacggcggcggccggaaaggtcggcgcggctgcgcttgatggcctgcgccaccagatgcacggcttcgtcctgaccgatgaccttctgcttcaaagcggcttccagccctgccagcttgacgaactcggtctcgcgaatctttaccgccgggatgcccgtccacagctcgatgacctttgccacatcgtccatggtcacctgaatttcgctggcagcggcctgcttggcgggcagttcggattccagcttggcgatgcgggtcttgcgctcggctacgcgctcgtagtcgatggcttcgttcacatccgcgctttccatctcggcttcttcctgcttcagggcgtccagctccttctgcattcccagatactcggagatgaccgggtgcgccagattgcagcaggcgcaggcttcgtccagcaggtcgatggccttatccggcagaaaacggtcggtgatgtagcgctcgctcagggtgaccaccgccgaaagcacctcggcgggcacctgcacatgatggtactgctcgtagtagcgcttgatgccgttcatcacggcaagggtgtcggctacgctgggctcctccacccgcacaggctggaaacggcgttccaacgcctgatctttttcaatgtacttgcggtactcggtaaaggtggtggcaccgatgacctgaatttctccgcgggagagggcgggctttaagatgttgcccgcgttcatggcgccctcgctctcaccggcagaggtgatggtgtggatctcgtcaatgaacaggatgacgttgcccgcagcctttacctcgctcagcaagcccttgacccgctgctcgaactgaccgcggaactgggtgcccgccacaaggctggtgaggtccagcagaaaaatttccttatttcgcagaccgatgggcacctgacccttggcaatgcgctcggcaatgccctcggcaatggcggtcttgcccacaccggcttcaccgataaggcaggggttattcttctggcggcggctcaagatctggatggtgcggtagatctcgcggtcgcggccgatgatatcatccagcttgccctcccgcgccttgcgggtcaggttttcgcagtaggtatccaaaaacttgcgcttgggcggctttttgccgtttttgcggtcggcctttttgtcgccgtcctgcttttccgtgccggtaaagcccagcgggaaggtggcattgctgccgggtacaagatcttcgtccatgttctccgcatcggcatcctcgccgctgccggacatattcatcagcatggaaagagggttggagtcgcccagctcctccatcatgctctccatgcggttttccatgttatccagatcctgttccgacatcccgaattgtttcatcagatcgtccacgggcttgatgtgcagttcccgggcacagtgcagacagtacccctcctgcttcatctgaccattctccatccgctggataaagatgatcgccggacgcttctggcatcgaatacagaccatagttcctccttgtcgcccctgttacaaaaaggggttgaacatattaaacgctttatagtaaagactgctgtgcatcacagtgtcgttgagcacattcaggttgccgccggtgatgaccacaagcccccacaccacgcacagcacgaggtatagatccagcattgcggtcatgccgccggtcagccagccaaggccacggttcaccgtgccgatgaccggcagcttattcaccagccccagcacggtgaccagcatactgaccagcagccgcagcaccgcgtagaacacaaagaacagcaccagcatgatcaccggggtgagcagcggctgcaatactttttccacgatggtatcggccagcaccacggcattatcggccagcacggcgttgatgctgcgctcgcacgccgccacgatggaggcgcggaagctttcgggcagaaagcccgcgtactgctgtgcaatgccggaaaggttgaccaccccgtcctccgaaaggtgggcggcgatctgggtacggaagcccccggccagcagattttcgaacacccagcctgcacaggcggcagaaagctgccgcgcgcccagcaggctgatgaggttgccggacagctgcacgatggacgccagaaagcccttgcgggcgtagcgcaccatcagcaccagccagactaccgtacataggatatcaaaaagaaatgacggattcttgaacatatcttattttccctgttataaagatcactttccccgcaaaaatactgttttttccctcggtcactgggcactggaagccgtttgctccggcggagcgatctgctgcaccgtgttgccgcacagcaccagcagctgcttgcccgcgatgagcgcctgcggacggacggaaagttcctgtccccactgatacaccccatctgcggcaaaacattccacaccactgtcggtaagcagataaaaattttgaccccggcgcaggatctggtttgccgcaggcacgttgccgctgtactgcacgttcagatctttatccagcagcacggcggtgcacacctgcccgttttccagcagcagagcggcgtttgcgccatcctgcgaaacgctgacaaggctgccgccaccaaggtcaaagcgcccccgctcgccgccgtccgcaccgtacaccacggcgcagttctcatacacagccagcacggtgtcgttgttcagccagcccagccactggggcacgctgtccccgctgctcagctgcaccgggtcgccctgcgcaaggttgagcacaaagagattcgcctgtaactgtccggcactggaggtgaccgccgccaccgccagacggcggctgtcggcggcaaaggccatccgcaccggggtgccctgcgtaccggtcatatcccagtgcagctgttcgctcatggtggaggtgtacacggtcagccgggcggtgctgtcggcggaatcggtggccaccgccagcgttccagtatctgacatggcacacagatagatgttgttttccagcgttttgctgtacaggttctgggtgcggctttccacccgcagctcgttgccggagcggttgtacagcacaaagcgggtcttgcccgcagccagcgccgggcgggcgtagccgctctggatgcttgcaaggcgggtgccgcctaagctgtacaccgcacaggcatcctcgtccatggccacaaagctgccggacatgggctgcacggccgtcagctcgccaaggccggtctgctgcggccagcccaccgccggggacagggcgatgtgcaccgtatccaccagatcctttacccgggcgatggatgcccccaccgcgccggtggcaaacagagtgaccagtatcagcgccgccagaatgatggcggtgcggcgcagacggcggcggcgcacccgctgacgcgctgcctccagatattccacccgtccggcagaaagcggctctccgtccgggttgctgccgccgcgatgaagctttttcatagttgctcttccttcctttccgggtattccacacacttcaggaacaagccctttgcgggcagagtagggcctgcccggctgcggtcccggcttgccagaatggcggggatgtcggcagcgcgcagccgccccgcgcccacctcgcacaaagtacccgccagaatgcgcaccatgttgtacaggtagccgtcggcggtcacctcaatgtccacctcgtccccgcgccgggtaacgtggcagtccgtgatggtgcgcacggtgtccccgtgggcggcagcagaagagcccgccgcgcacagggccagaaaatcgtgggtgcccacgaactgctgcgccgccgcctgcatggcggcttcgtccagccgccggggcacgcgggtgtagtaggcggcgtcaaagggcgagtcgatggggtggttatggatgcggtacaggtaggtcttggtatgggcggcgtaccgggcgtggaagtcctccggcacggtctgcgccgcaagcacccggatatccggcggcagatgctggttgagcgccagcggcagcttttgtggcgggatgcgagtgtcggcgtgaaaattcaaccgaaagcccagcgcgtgcaccccggcatcggtgcggctgcagcccttgatatcgggccgtgagcccagcaccgcttccagtgcatcctgaaaggtggccgccacgctacgcccgttgggctgcacctgaaagccgcagtaatttgtgccgtcgtaggcaagggtaagtaaaaagttcatagttctgatttaaaatggccttttgcggaaagccttcccccggtcgggttaagg

SEQ ID NO: 13856 - DNA, 6189 bp, Unknown
  gut microbiota DNA sequence
caggcgatgcagaccgcaaggtcgatgtagtcctgcttttcgcagcgcagcaccttcaggcgggtgcggcctgtgccgccgcggtagcagcggcactccatggccatggccagctcgtctgcgcggcggaaggccgagatgaacagcgggatgagcaccggcaccagcgccttgacccggtcggtcatcttgccggtgtccagctgcgcgccgcgcgccttctgcgcgttcatgatcttatccgtctcctcgataagggtggggataaagcgcagggcaatgctcatcatcatggccagctcgtgcaccgggaagtgcagcttgcccaagggcttgagcagctgctcaatggcatcggtcagcacgatggggctggtggtgtaggtaagcaggctggtgcccgcgatgagcgccatcacgcgcaccgccatcagcactgcatagcgcacgccctcggcgtagatgttcaaaaaccagaaatgcaccagcgggtcgccctcgccggagacaaagaagaggttcagcaccgccgtgaacagcacgatgggcagaatgggcttcaggcttttgccgatcatcttgaccgggatttttgccaccttgtacatgacccccaaaaagaggatggacaaagtaagccccaaggggttggaggctgcaaacagcagcacgatataagcgatggtcagcacaagcttcagtctggggtcgaaccggtgcaccagactgttgcccgggaagtgctgaccgatggtgatatctcgcagcatcagacagcaccccctttccgggcagcgctgcggggcagcacaagactttccccggcatcgcggcggcgctttgcttccagcagggtcttgaccgcgtaaggaatggtgtacacgtccgccgggacgtccacccccatctcccgcagcttgaggaaaattttagtcacctgcggcaccgacagccccagctccagcaattccggggcgcgggcaaagaccttttccaccgtgtcatacatggcaattttcttgttgctcatcaccagcacgcggttggcatacttggcaatatcctccatgctgtgggacaccagcagcacggtggtgccggtctttttgtggtactccttcacctcggaaaggatatcgtcccgtccctccgggtcaagaccggcggcgggctcgtccagcacaaggatgcggggcttcatcgccatgacgccagccaccgccacccggcgcttctgaccgccggacagttcaaaggggctgcgctccaaaagcgccgggtctaagcccacaaagtctgcggcttcgtggacgcggcggtctacctcggcttcgtccagacccatgttcttggggccaaaggcgatgtccttgtagcaggtctcctcaaacagctggtattccgggtactggaacacaaggccggtgaggaagcggaaatcccggatcttttccgggtctgcccacaggtcgcggccgtcaatgtaaattttgccgctggtgggcttgttcaggccgttcatgtgggtgatgagggtacttttgccggagcctgtggccccgatgatgcccacaaaatcgccctcttctacggtaaagctcacgtcgtccagcgcggtcactgcggtgggcaggtcggggttatagacgtagctcagatgttctaccttaatgatatctgccatttcgtccgcccccttactgcagcagttcatacagcgcctgtgcgcaggcaccggtgtcgatgatgccctccggcatcgggataccggccttcaccagctcgtcccgcagttcagcggcctgcggcacgtccagatgcagactgcgcaccttctcggtctggctgaacacctctttcggggttccctccatcaccacatggcccttactcatcaccagtacacggtcggcctgcgcggcttcttccatatagtgggtgatggacaccaccgtgatgcccatgttcctgttcaggtagtggatggtctgcatcacctgctcgcggccgcgcgggtccagcatggcggtggcttcgtccaagatcaggcagtccgggcgcatggcaaccacaccggcgatggccacccgctgcttctgaccgccggaaaggttgtggggtgcgcgctcacggtattcgtagatgccggccatcttcatggagtcgtccacccggcggcgcatctcgtcctgcggcacaccgaggttttccagcgcaaaggccacgtcctcttccaccacggtagcaacgatctggttgtccgggttctggaacaccatgcccacggtctggcggatatcgtagagtttctcttcgtctgcagtgtccatgccctccacatacaccttgccgctctccggcagcaaaatggcgttgaagtgcttggccagcgtggatttaccacagccgtttgcccccagcaccgccacgaactccccgcgcttcacctgcgcagatacgccgtccagcgcatagaccggctgctcggcatcgtagcggaacttcaaattttcagcagttaaaatcgtatcactcatgctttgtttctctttctggtggtgcgcccctccgaaaggggctgtaccccattcttagcatatatttatctcagtcacggctgtcgccgtgactgagataatattttactttcattcttcccaaatcgcggtggcgccgcagggcaccacgccgccggtggcagacaccggcaggccgatctcgtcgcagctggtcttgccgccaaagcggggaaccagcgtggtcttgagcatatactccatgactgccggggacagaccggtggtgtagctgttgaccgcaaagaacagcggggtatcgctgagcacttcttcgcactggctgatgaggtcatagatgcagtcttccagcttccagatctcgccgccggggccgcgcccgtagctgggcgggtccatgatgatgccgtcgtaggtgttaccgcggcgcttttccctcgccacgaacttggcgcagtcgtccaccagccagcggatgggcttatcggtcaggctgcttgccacggcgttgtccttgccccatgccacgatgcccttggaggcatccacatggcagacggtagcaccggcagcggcacaggccagcgtagcgccgccggtgtagccaaacaggttcagcaccttcaccgggcggttcgcggcgcggatcttctgctggtaccacgcccagttgaccgcctgttccgggaacacgccggtgtgcttgaagccggtggggctgacgataagggtgagcttatcctccccctcgccgcagctgatcttccacttttccggcagacggcggcggtactcccactcgccgccgccctgattggagcggtggtagatggcatctgcctttgcccacagggggctttgcttgggggtcttccacaccacctgcgggtcggggcggatgagcaaagtttctccccagcgttccagccggttgccgtcggtggcatccagcagctcatagtctttccaagtatctgcagggcgcatagcgtcctccttccgtttatcgcgtcaaaatcctatatataataagtcagaacaggctctgctggccgttttcctcggcgctgccggtctccggggctttcatgcccagatgctcgtaggcaaggcgggtggcacagcgtccgcgcggggtgcgggtcaaaaagcccatttgcatcagatacggctcgcacagatcttccagcgtgacggcctcctcgcccagcgcggcagccagcgtttccagacctaccgggccgccgttgtacatctcgatgatggcgcgcagcaggctgcggtccagctcatccagacccagcgcgtccacgtccatccgtttcagacccagcagcgccacgtcccgatcgatgatgccgtcacccagcacggtggcgaagtcgcggatgcgcttcaaaaagcggttcgccacacggggggtaccgcggctgcactttgccagctcgtaagcaccttccggggtgatgggctgatccagaatgcccgccgaccgcatgatgatgcgggaaagctcgtccgggctgtacagttccagcttgagcagcacgccaaagcggtcgcgcagggggccggtgatctgtccggcgcgggtggtagcgcccaccagcgtgaaccggggcaggttgatacggatgctctgggcgctggggcccttgccgatcatgatatccagcgcgtagtcctccagcgccgggtagagcacctcctccacctgccgggacaggcggtggatctcgtcgatgaacagcacatcgccctcctgcaggttggtgagcagggcggcaaggtcgccgggcttttcaatagccgggccgctggtgatgcggatctgcacccccatctcgttggcgatgatgcccgccagcgtagtcttgcccagacccggcgggccatagagcagaatgtgatccaccggctcgccccggcgcttggcggcttccagataaattttaaggttctgcttggccttttcctgcccgatgtagtcctccagatgctgcgggcggaggttattttcctcattgtccgccggggtcatgacgggctgcatcatttttgcgccgtacagcgcggtatcgtcctgcattgcttacctcctgcctgccatgctacgcaaggccagcttgatgatctcttccaccggcagcgtggcatcgatctttgcgatggccagcgccgcctcgctctggctgtagcccagcgacaccagcgctgcaatggcctgtgcgctgctctgggtcgcgggcgtatcggcggcagtgcccgccacatcctccagcgagatgccgtccacaaagcccttggccaccttatccttcagttccagcacgatgcgctgcgccagcttcggccccacgccggaagcagccttaaaggccttgtggtcccctgccgagatggccagcgccacccgctgcggctccatgacgctgaggatagccagccccaccttggggccaacgccggacacggcggtcagcatctcaaagcaggcctgctgctcttcggtggcaaagccgtacaggcttacatcgttctcggtcacgctcatcacggtgtacagggtggtctcctgccccacaccgggcagtgcccccgccacactggccgggcactgggtatagtagcccacgccgccgcagctgagcaccacggcgttcaggctttttttcacgatttttccagtcagacagtagatcatttgaataaaaccctctcagtcaatgccttacggcattgccagattcccccttttgtcgctgcgcgacatcttcccccggcgcgggggaagtctttcctctcagggggagctttttatcggttaaatcggtcccgccacccggcgggtatagcggttgagctggttgccgttggtgtgacagaaggtaatggccatagccagcgcatcggcggtatcgtccggctttggcacggcgggcagatgcagcagcacccgggtcatctcctgcacctgctttttgacggccttgccgtagccggtgaccgcctgcttgacctgcatgggggtgtactcgtagatgggcagccccgcctgcgccgccgccaacagaatgaccccgcgcgcctcggccacgccgatgacagtggtctggttgtgctggtagaacagcttttcgatggccagcacctcgggctttgtgcgttcgatgacctccttgatgccggtatacacctcgtccagccgccgctcaaacggtacgcccgcgtccgtgcacaccgcgctgaaatccaccggcgcaaagcggttgcccgcatactccaccacgccccagcccacgatggcgtaaccggggtcgatgcccaaaactctcatgctgtgttccctttccgacactactcctattatagttttctattatagcacaacgtctggttgggggcaacaagaaagctgtcgctcgccgcctcaaaacccgcgctgcaccgcacagaagccgggttttgggatgctttttcaaaaaagttttacaatttttgaaaaaagtccttgctttatggcatcagatatggtattataatctagctgatttcggcaaaacagaatatggacggttagctcagctggtagagcatctgcttgacgtgcaggaggtcacaggttcgagtcctgtaccgtccaccatacagt

SEQ ID NO: 13857 - DNA, 3553 bp, Unknown
  gut microbiota DNA sequence
caacggtaccgaggtagacgctatctacatttccaagtacctgaacatcgtgcaggatggtcgtgcctattccatcggcggcgttgaccctgctgctggcatgaactttgatcaggctcgccagtattgcgaggcaaagggcgagggctggcactgcatgacccgcatcgaatgggggctgattctgcgctggtgcatcgccaacggttttctgcccaagggcaacaccggttttggcaagcatcccagcgagaacgtctacaaagccattccgacctacaaggacggtgacaaaggcactggtcgcactgccactggcaccggtcctctgacttggtatcacgaccagaccccgtctggtattgctgacctcaccggcaatatctgggagtggtctggcggcgttcgcatggtatacggcgagctgcagattctggccaataacaatggtgcggattctgcacacagccagtctgcgacctctgcagagtggaaagccatcaacgctgcggacggcactctgattacccctaacggcagcggcaccacttccggttctgttaaggctgaccatatcaacaacaagctggtctggtccaccaatattaccgtcaaaaaggacgaatccgactacgaaaccgaggcgcagattgagtgcgacagcaccatcaaggacggcgcgaagctgtggctgtacaacctcggtttcttggagtatcccggcgatacgctggaagatggcaatggctgctggtttaacaatggcgctgccgaacggtgcttcttttccggcggcagctggtacggctcctcttacggcctcgcctcgttctacggctacgacccgcgttcctacgcgggggcgagcttgggcttccgctccgcttttgtgaaactgcccactgcctgactgtgacctgtttgctgtgcgatagcacagcacgttccctcgaccccgcgaagcggggtcgtttataaaattgattttttgcttttcggtggattttgccgaaaaccggaagaatccaccgaaaggcagattttcaatgcaaatcttgttatactatcccgcgttcggaggagggtctaccgcatggcagaagaattgaaacttatgcagaaagtatacgacatgatggagtatgcttatccggctttggcccagtatccgaaatcggaaaaatttgcgctttgcacggatataaagcactgcatggatatcatgttggagcgtaccatcgaggcgcagaaaaagtattacaagaagactaccttgcaggaactggacgttgagattatgaagctccgcgcatatctccggctatcccatgagttgggtttcctgcccatgaagaaatacgaagtctggtctggcatggtggtcgaaatcggaaagatgttgggcggctggctgaaaaccgtcaacggtcagccgaaaaacatagggaatcggccgtagcgtgcttctactccggcggcaactggaacaactcctcttacggcctcgcctcgttcaacggcaacaacccgcgttccaacacgagggcgaacttgggcttccgctccgctttgcctcatcgtcagatactgcaagctcatgggcttgctctcagtacagagggataaaggggtcgattcccttggttgcaatatgcagcctgaaaacaccagtattctggccagtgttccggcgtgttgggcgcacggcactcgtcagggtgcgacctcaggagggatttgttggaaaaatacagacacgtttttgaacgttttgcaacgttcgacaatatgtatgacggttatctgaaagcccgcaaacacaagcggcaacaggattgcgtactccagtacacaaatctccttgaggataatttgatagattcggtgaatcggctccagtggcatgaataccacaccgggcggcttcaccagttttatgaatactatccgaagctgcgacttatcagcagcttgccgttctacgacagagttatcaactgtgcagcgcacaatgtcctgtggcctatctaccgcaagtcgatgtatgagtacagttttggcagcatcgaggagaaaggtcctatccgcgcatcaaggactgttcagcagtggatgcgaagctatgcccgcaagccgggtgactggtacatcgtcaagatggacattgccaagttctttttccgtatcccggtggatgttcagctaagggagctttccaaaccgctggatgacccggacatggtgtggtttctggaacaggctatccgctgcgatggtcggccgctgggattgcccgtgtactgcacggacgttacgaccgccgagcggatctccggcatcgggatgcaagtcggcagcctcatttcgcagatgaccgccaatgtggttatgaccccaacggactactacatcaagcgggagctgcaggtgccggaacacgctcggttcatggatgacatgatgtgcattgtcgatggcaaaaaggcggcatgggaagtcgtggggtatgtcgatgactacctgcgtaccaatgttggtttgcagctgaacgacaaaacagcggttatcccgcttggcaaacctgttgaatttgtcgggcgaaaaatcacccctgataaaatcgagctgcggcggcagacctctctcggcatgaagaaacatcttcgatatgtcagagaggcctacggtcgtggcgaggttccacttgagtacgccctgagcgtgattcagagctatctgggcttgatgcaggactgcaacaacgatgccctgcgaaatcagatcctggaggactacgttctggttcgccactcacaagatatgctggatgcagcagaataaaatcaaaaggcagcttcacccgccggggtgtggctgccttttttgtgcaggaggacacaatgagtatccaagaaatactgacggcggggggcgggacgctgatagtcctccttacgctggtccagatcgcccccatcaaactgaatccgtggtcggccattgtcaaatggatcgggcacgctcttaacgccgaggtgttggagaagcagcaggaaactcaaaagaagctggatgaacacatccgggtcgatgacgagcggaatgcgaaccttcttcgcacccagattctgcgcttcaatgacgaactgattgatgataagcaccacacgagggagcattttatcgagactttggccatcattgatgcctatgaggactactgccgcagtcaccccaactacaaaaacaaccgctgcatctgtgcggtagcgaatatcaagcgggtgtacaacgagcggcttcaaaagcacgacttctcttgaaggaggttttctacatgagagtcatcgtctatcaggccagcgacacatctgccctgagcaagaacttcacccgcaaggacttcaagtgcccctgtggatgcagccgccagatggtcgattcggagctggtcgaaaaacttcaggccatccgggacaagctgggcaaggccatcaaggtgaccagcggataccgctgcctctcgcataatgcggcagtcggcggtagccct

SEQ ID NO: 13858 - DNA, 6114 bp, Unknown
  gut microbiota DNA sequence
gcgaagtcctggcctacgtgtggtaagaaaggggtaaaagacaatgtcgagaattggaagaaaacccatcgtcattcctgccggtgtcactgtcactgtcgatgaggcagcacacactgtcgccgtcaagggccccaagggcagcctgaattccaactatcatcccctgatgaccgttaaggtcgagggcaatgaggttttggttacccgccccaatgacgaacccaaggcccgcagcctgcacggcctgacccgtaccaacatcgccaacatggtgaacggtgttgtgaacggctacgagaagaagctggagatcgttggcgttggtatgcgctgccagaagcagggctccaacctggtcatgaacctgggcttctctcatcaggtgaatatccccgataccgaggattgcaccattgtgtggcaggatcccaaccacttctctgttaccggtatcgacaagcagaaggtcggccagtatgctgcagagatccgcggcaagaagccgcctgagccgtacaagggcaagggcatccgctacgctggcgaggtcgtcaagcataaagaaggcaaggccggtaagggcaagaaataaggtaaggagtgaaagacaatggttaagcagatcgacaagaacgaagctcgtcttcgtcgtcatcgccgcgttcgcaacaagatcagcggcaccgcagcacgtcctcgcctggatgttttccgctccgccaagcacatctacgctcagatcatcgatgatgagcagggcgttactctggtgtcggcgtccactatggacaaggacttcaacggcaacggcggcaacgtcgaggccgctgctgagatcggcaagaaggttgcagcaaaggctctggaaaagggcatcaccgaggtcgtgttcgaccgtggtggctacgtttatcatggccgtgttaaggccctggctgatggcgcccgtgagggcggcctgaagctgtaatgagaggaggaaacacattatggctatgagaaaccgtgaagacgacggcatgatcaccaaggttgtgtctatcaaccgcgtttccaagactgtcaagggcggccgcatcatgaagtttgctgctctggttgtcgttggcgacggcaagggcaccatcggctacggcatcggcaagtccggtgaagttcccgaggctatccgcaagggtgaggccgctgccaagaagaacatgcacaaggttgccctgaagggcaccaccatcccccacgagatcgtcggcaagtacggcgcaggcgctgttctgctcaagccggctgcacccggtaccggtatgatcgccggcggccccgtgcgtgccgtcattgaggctgctggcatcaaggacgttcgtgcgaagtctatgcgttccaacaaccccatcaacgttgttgctgctacctttgcaggtctgtgcggtctggtcagcgccgagtctgtcgctgagaagcgcggcaagaccgtgaaagaaattctgggttaaggaggtaactaaccatggcagataagatgctcaagatcgagctgaagaagagcctgatcggccgcggcgctaagcagatcgctaccgctgaggctctgggcctgaagaagccgggcgacgttaccgttcagcctgacaacgccgctacgcagggcaagatcgcaaagatcggcttcctgctcagcgtcaccgaagcctaatagcagggggtatacgcacaatgaagcttcatgaattgcacgccagcaagggcgccaacaagcctgtgacccgcaagggccgcggcattggctccggcaatggcaagactgccggcttcggcagcaagggccagaaggcccgttccggcgtgaagcacgctggtttcgagggcggtcagatgcctctggcacgccgcctgcctaaggttggctttaacaacatctttgctacccagtacgccatcgtcaacgtggctgatctggaggctgctttcaatgccggcgatgtcgtcgataccgaggctctgaaggctaagggtctggtcaagaagactctggacggcgttaaggttctgggcaacggcgagctgaccaaggctctgaccgtgaaggccgcagcctattccgcttctgccaaagagaaaatcgagaaggcaggcggaaaggctgaggtgatgtaaggtgttccagacattccgtaacgcatggaagatccccgagcttaaaaatcgtcttctgttcacgctggcgatcctcgtggtttaccgtcttggctgtgccatccccgtgccgttcgtttccggctctgctctgacgcagatgtttgcaaacggcgatatgctctcgtacctcaatatgatgagcggcggcgcactggcaagatgcacgctcttcgcgttaggtgtgacaccctatatcaacgcctctattattgtgcagctgctgacggtagctattcccgcgctggaaaatctggcaaaggaagcggacggccagcagaagctgcagcagatcaaccggtacgccggtgccgtggtcgcactgatcatgagcattggctactacttcgtgatccgcaatatgggcgcactgaagtatgtttccggcgcagtcggcgtgttcgccgctgtggtcatcatcgccaccttcgttgcaggtgctcagttgattacctgggcgggcgagcagatcgatgacaagggtatcggcaacggtgtttcccttctgattttcgcctccatcgtttccaactggtcctcgctgtacacctctgtcacgggtctgctgacccgcgcagcggccggcgagcctcagttctatatcctgctgcccgttctggtgatcctggcactggtcgctgtggtctttgtggtggtcatgaccaacgcagagcgccgcatcaccatccagtacgccaagcgtgtggtgggtcggaagcagatgggcggccagaacagctacctgcccctgaagctgaacatgagcggcgtcatgcccatcatcttcgcttcggcactggtgtccatcccgggcaccatcggcagttttttgcagatcgatcagaccgctcacccggtctggtatgcgttcttccataccttcaactacacctcttggctgtacgttgtgatctacctgctgctgattttggcattcaactacttctatgtggccatccagtacaaccctgttgagatcgccaacaatctgcgccgcaacaacggctcgatccccggcttccgtcccggtaagccgaccagcgatttcatcacccgcaccctgaacaagatcaccctcatcggtgccatcttcctggctgcggtggctgtactgccgatcattctgggcaacctgaccggtatgagcattcagctgggcggtaccagcctgctgatcgtggttggtgtggcactggataccacccgcagcctcgatagctttatgaccatgcgcaaccacaagggtttccttggctgatctgaagcaataaagatgtaagaaagcactggaaaggagagtacgctcatacttttcagtgcttttttgcttttgtacgtatgtttctatcatgtggcatataagaaaggaagcgatcctatgaatctgatcctgttgggcgcacccggcgcaggcaaaggcacgcaggccgagatcatctgcgcaaagctgaacatcccttccatcagcaccggcaacatcctgcgtgctgctgtcaaggagggcaccgagatgggtctgaaggccaagagctttatggacgccggtgcactggtgcccgatgaagtcatcatcggcatcctgaaggagcgtctggcacaggctgactgcgccaacggcttcattctggacggcgtgccccgcaccattgcgcaggcagaggccatcgagaccatgggcatccgcatcgacaaggtgctggaactgcaggttgaggacagcgtgatcgtggagcgcatgagcggccgccgcgtctgcgagaagtgcggcgcaagctaccacatcctgaacaagaagagcaaggtggagggcgtctgcgacctgtgcggcggcaagaccgtcatccgcaaggacgaccagcccgcaaccgtgctggatcgtttgaaagcctaccatgagcagaccgagccgctggtggagttctaccgcacccgcggcaagctggcagagatcaagttctgcccctctatcgaggagactacggctgaagtcatgaaggctttggaggcataagcgtgatccagatcaaaaatgcaaaagagctggacggtatgcgccgggcaaacgccctgagcgcagctgccctgaagtacggcggagagcacatcgaagcaggcatgaccacttgggagctggacaagctgatctacgacttcatcgtgaagcacggcggcatccccaacttcaagggtctgtacggttttcccggtacagcctgcatcagcctgaacgataccgtcatccacggcatcccctctcacgatatcgtcatccgcccgggtgacatcgtgagcatcgacaccggtgccaaggtggacggcttcaacggcgacaacgcctgcacctacgcggtgggcaaggtggacttggaagcccagcgcctgctggaggtgaccaaggcttctctgtacaagggcatcgggcaggccgtggcgggcaaccgcatcggtgatatcggctacgccgtgcagagctactgtgaggacgcgggcttctctgtggtgcgtgactttgtgggtcacggcaccggcaaggaactgcacgaggaccccgaggtgcccaactacggccatcagggccgagggccccgtcttgtgcccggcatgaccatcgccattgagccgatgatctgtcagggcgactacaagatcaagcagctcagcgacggctggactgtcaagaccaaggacggcggactggctgctcactttgagcactctatcgccatcctgaaggaccgcaccgagatcatgacccgcagctgggatgatccggattttgacccggccaccttcagcctgaagtaagcaacctttataaaggagccgctgcacggatgatgtgcggcggcttctttctcttttcactcctgcaatttgtgcaattgtgacaagttttcgtgaaaaagtttcaccttcacggtggagaaacgcgaaaggaggacgggacggaaaagagcttttatacagaataattttttatcggaaatacggaaaaaacctcttgcaaattgacaacaaaaggtgtataatttataaatggctgtggaagccagatacttcctcgacggacaggcttagtctgcccgttttgcggattttgtgccgcaggagatgaagtatgtggcgctcatcgccacctgtccgtctggggatcggcgtgaaagctcttgaaaagagaagcggcaaactgcacaaaaacgggcgcaggcacggaagaatgcagtgctttctgtttttggagcgggagcaccggtgctcaattatgacaaactgagcagatccaatgaggaggcaaatagcttgtctaaagaagacgtcatcgagatcgaaggcattgtgcgtgaagccatgcccaacgccatctttaaggtggaaatgttgagcgaggataagaacaccgggaagctcactcccagcggtcacatcctcttagcgcacatctccggcaagctgcggaccaatttcatccgtatcctgcccggggacaaggtaaccgtggaaatgtcgccctatgatctttctaagggccgcatcacctggcgctccaaataagcgtcagggcatcaaccaaaaggaggttcaacatcatgaaggtcaagccttccgtgaaacccatctgcgaaaagtgcaaggtcatccgccgcaaaggccgcgtgatggtcatctgccagaaccccaagcacaagcagcgccagggctaattcgggcgcctgggggtcaagtgcgtagagtcccggcgcagaccccgacactgacatgggatgatttttggaggaaactactatggcacgtattgccggcgttgacctgccccgcgagaagcgcgttcaggtgggtctcacctacgtttatggtatcggccagaccactgctaacaagatcctggaagcaactggcatcaaccccgatacccgcgtcaag

SEQ ID NO: 13859 - DNA, 2432 bp, Unknown
  gut microbiota DNA sequence
acttccttttccacggaaggagcaccgttcttttcctgcacggttacagagggcttggtggtgtccagcatgcacagagctttgctggaagtgtccacgttggaggtaatcaggtagtaaccaagttccagaccggtgaaggtcacagtgccagagttgttagcaacttgagagtcatcaggagacaaatctttagcaaatttcatggcctctttagagaaagcctcaatatcagcagtggtctcagtggcagctttccaagtaacataaccatctgcgtcaggttcaagataagtgctagaatcaacaaaggatttccacttagtagtagccttgtacttgaaagcggtgtaagaagaggcatcatcgccagtgccattggtttcaaggtcaaggatcttataaatcttataggtcttgccatccacagtgtttttaacggtaatcgaaccgttagtagcaggtgccgcccacgccggaatggccatggcgcaaaccatagcaactgccagcagcgcagccatgagtttcttcattgctttcttcatggagaaaagctcctttctttttttctgccccttgctgccccccccctgcattttgcacagggggcagcaaggggtgtggtttttgttcggactaatgcgtaaactttgcgctgggcgggcggggtttaagctccgggcagccagcagggaagtgcagtttagtcatctgccctcccttcgcgtctgcgcttgcggtggataaaactatatgccagcgcagacagcatcattgtgccgcccacggctgtatacgggagtgtaccggtgccgccggtagaggggagctcgtagtcagagttgtcattgggggtgttttcgcagtagtagtagaagctgccaaacatctgcccttcagccaacttgtactcgctaaaggtatctgtactcttaaagtcgggaacgccagaggccgtgtagctgtgactattgtcagaaattacaaaataatggtaattattcggtgtccgataaccatcaggcgcttgtgtttccttcaagcgatagaaggtgttaacgtccagactgccaagcgttacgttgccgctggtgttggtcactatatcagttttttcgcctttccatccagtggtagcgttatacttttccagactgaactctgcaccgggcagaaccttgtctggcgtgccggagtacttgacgatggtcaagcggttggagttgaagtcgataccggcagaagctcccgaactggaagtaaagctggtgctgcattgctcgttcttccacttgccattcagttctgcagtgttctcaaaggtgaaggtattgcctttaaccagaccttccgtattaactcggtaatggaaaaccagcacaagcggggtgctatcgggtaccattgtccatgccttaagctggtggctgctattgctgctgtacttggaatagtaggtggacgtgtcaacgttatttccggcggcatcgtcatcaaactttccggctacacaggtaaggtctgcacgccatgtggttgcttccagcgtaccatctgcctgcagattggcatcaaaaacagagatgccttccagcgttacacgcttggtgccagacccatcagcccacaaatcagagggcacggtcatgacgtcttgcaggaccataggctcgccgccattcagcgttgcaccgtaggggttcagcttgacctgataggtcaaaagaccggtggtttcgtcaaaagtaccgctcttgccaacaactttgcgctcgactgtttcggtaaaggaggtatcacctatcgtattgccgttgcgctcgaacttggcaacgttcttaaacgatgcggtattgtcattccagatgtcggtacatttaggatccagcgtagtgtcgtaggtgatattgatttgcttgcggatctcagtcacaccgttatttgtataactgaacgactccggcaacatggtgattaccagcgtggtggttccgtctgcgtttttggtgactgtagatgtagcgggcagggcaacgccatggttcttgatttgaacgctgctttcgtccagaaccagaccgcggggaatggtatcggtaatgacccatttggtgtcattttcccatttcagcactccatccgcgttgagctcgatcgtccaaggcagcttttggccgggctgcagggtagtactgccgctgccgctctgaatgttcgtccaattccaaccacaagcatacttatagaagtaacttatcgtgtcagagccttttgtaattttctgctcagcggttgccacagtgccattattgatgcggcagtggttcttgaccgttgcaccgtagcttggcagctgctggacgataaagcattttgttgtgtaggtaatggtcagcgggccgatcacattggagtttgtaaagtcgatc

SEQ ID NO: 13860 - DNA, 5446 bp, Unknown
  gut microbiota DNA sequence
aaagagcatccgcatggcggtagcagcggttctggcagtgttgtgcgcttttgggctggtgttctggatgggcggcgcaaaaacgccggtgacggcagaacaggcgaaaatatggacttacaacaaaaaggaaaacgaggccaacctctgtgtgctggaagtgcagggtgaaaacgtccggctggaactggaaggctcctttaactggggcaaaccatccgttaccgtccgggcggtgcgctataccttcccgcacatccatgccgcgctggaagggctgctgggcacatcggcttccgataccagcgttacagtctccggcacacagctgctgacagtgcaatgcgccgacgagatccgctattatagggacggtcagcgggtggagcgattcatcctgaaaaaagaggatggaacgcagacctatgtttacgaatccgaggatgtggtcacacaggaacaaggcgtgtttgagaagggctgactatggacattgaaaccatctaccggctctacttccgggacgtctgcctgtttttgcaggggcttacccgcagcgaaacgctggccgaggagctgacgcaggagacctttttccgggcactggacggcctgaaagactatgacggcaagcaggatgtgcgggcgtggctgttcacagtggcgcgcaacgcctactacgattactgccgccgcgcaaagcacgccgccccgctggaagatgccgaaacaaaagccgccgacagcccggacattgcgcagctgctggtggacaaggatgccgcctttacggtgcaccagtgtctgcacgcgctggaagaaccctacaaggaggttttcagcctgcgggtgtttggcgaactgccctttgaccgcatcggggcgatttttggtcacaatgctgcatgggcgcgggtgacctattaccgcgccaagacccgcatccagaccatgctggaacagcagaaatgatcgggaatgcgcattgcgcgaaccctctcagtcacgccttacggcgtgccagctcccccgaaagggggagcttttttgtgtggcggcaaagtttgtctgtccgggagttaccccttctgtgaaaaaaagtggctcaaaaacgcccgcaggcgtttctgagccacaaattataataatattttttccgcggttcaagccttctcagagggcttgctcaggtctacgctgcggatgatcttgcgcaccggcaggatgctcttggcgttcatggacagctcgtccacgcccatgcgcaggaaggtctcggtcagggcggtgtcggcacccagctcgccgcagatgcctacccagatgccgtgacggtgaccggcttcaatggtcatcttgatggcgcgcagcacagcgggatgatgggggttgaagaagggctccagctttgcgttctggcggtccagtgcacaggtgtactgggtcaggtcgttggtgccgatggagaagaagtcgcactcggcggccagctcgtccgcgatgaacacggcggcgggggtctcgatcatggtgcccacttcaatgttctgccccatcttgacgccctcggcggtcagctcggcacggcactcttccagaacagccttggcgtcctgcagctcccgcaggctggtgatcatggggaacatgatgctcatgttgccgtaggcggaagcacgcagcagcgcgcgcagctgggtcttgaagaagtccttgcgggtcaggcagatgcggatggcacggtagcccagcgcggggttatcctcgtgatccagcttcatgtaatccacggtcttgtctgcgccgatatcacaggtgcgcaccaccaccttgcggggtgcaaggctttccaacacctgcttgtaagcctcgaactggtagtcttcggtggggaagtccttgcagttcaggtagacgaactcggtgcggaacagacccacgccgccggcgtcgttctgctgcacagcgcccacatcgcccatgccgccgatgttggcaaacacattgatggtcttgccgtccagcgtggtgttgggcttgcccttcagctcctgcagcagggcctgctttttctgatcttcctgctggcgctttttcaggctcttgagcaggtcgggggtggggtctacatacacacaggcgttgtagccgtccaccacagccatcttgccgtcccagtcgtcctgaatgtccttgcactggatcagggcggggatgttcatgctgcgtgccagaatggcggtgtggctgttggagctgccctcgcgggtgatgaagcccagcagcaggcttttatccatgcgcacggtctcggagggagccagatcctcggctaccagaatgctgggctcggtgccctgcagggaagcgttgtccaccccctgcagaatgtccagcatggcctgcgcaatgtccagcacatcggcgctgcgggcctgcagatacgggtcgtccatggcagagaacaccgcagcctgattgttgccggcggtcttgacggcgtactcggcgcacatcttctgcccgttgatgatctccttgatggcgtccacaaagtcgtcatcatccagcatcatggcgtggatgttgaacacctcggcgatgtcctcgccggcctctgccagtgccttttcatacagggcggtctgctgctcaatggccttctggcgggcagcttcaaaacgctccagctctgcggcagtatctgccacaggggcggtggaaatcgcggtatcttttttcttgtagatcttcagcttgccaatggcgatgccattgagcacgcttttgccggtgcctacctgcatagcactttctccttccacttacagccgggcgtgcagcgcccggcgttttgtcaaaaaagcccccgcagtttccccgcgagggctcggctttcaagtcgcggctcagacgttctcgctcaggaacttctggattgcctctgcggctgcttcttcatcatcgccttcgaccttgatggtcacggtctcgccctgcttgacgcccatgcccatcagagccatcagcttgcgcatatcgcagctcttgccgtccttctcgagggtggcggtgcttgcaaagcccttcacggtcttgaccagcaggccggcgggacgggcatggatgccgcaggcatccttaatagtgtactgaaattccttcataatcattttctccttactacttgatccctctgcccgggctgcacattcagccccggaacatggctttgccaacgggaatcggtatactattattataaacccgtaccgttttttttgcaccgtttcatattgccgatttttacaagaattttttgttatatttgaacatacggatgctacaaaaatccgtgttttgtctaatttttgtcgaatcgtttgtaaaaactaggcagtttgtgcaactgccggacaagagcttaaaaaaggtcgttttttaagcaatgccgtccctattccacgggatacccttctgcgtccagcggcagctcggtgtagggggctgcctgcggggcggcttcgggttctgcctccggttcgccggaggtctgctgcgcggtgctgtcggtcagctgctcgtcgtgccgctcgccccagtcgccgctgtaatcctcgccggaagtctgctttgccagttcgttctgagcgtcctgcagtccaagcaccgtgccggaaggtttttccagcagatacgcgcccacggccttctttttatacaccagcagcaccccgtagcggctggtctcgccgttgcttgccgccgggagcagcgccgaccatttttccacagttttgcccttgtagcgggcaagatccatgccgctctgctgcaccaccccgttgaaggcagaaaaactgtcgtcccacctgcgggggatcttgaccttatccgccgtgatggacgcgccgtccacctccagcccgtagccggtgaaccatgtctggatgtcctgtgcgctctcgatacggttcaccggggcagccaccgccaccgtccgggtactgatgaaccgccccagcatggcgctgaacaccaccagcgcgcagcacgccgcccctgctcccagttttttcaggctcgtcttgctcagtgtgaccacaaacatatccccatgcctccccaccatttgcgcttgcatactctgccaccagcttatgcacaaaaacaggggagtatgataaaaacacccccggtcagcggcgcaagccctgaccgggggtgtttagtctcttttacccgatatagctgatattggcgtccagctcgccgctgtagccgttgatgtgggctgttctggtgccctgccacagatcgcagccgatggggctggaagagacgccgtagtgggcgttccagatggtgtagcggctgcgcagggtgttgtagtccacccgcttgcggtaccatgtggtggaagcgtacacgccgggcttgtagcccagctcctttacccgctcgcagaaggcgatggcgcacttggtgcgatcctcaacgcccagaccgtcagcgcggccggtgccgcccggagcggtggaagcctcggtgtcatagaaaatggggtagtccagcatccggccgttcagcgcccagttgcagccctcggcctcctcctgcgcttcggcctcgtttacggcctgcgtaaagaaatacacgcccaccttcagtcccgcgttgcgggcattggtgaagtgctcttcgaacatggggtccttgaccaggtttcccgcagcgccgtagccacggtagccgatgcggatgatgacgaagctcacgccggattttttgatcttgttccagtccagcccggactgatacttggacacgtcgatgccaaaggtcacgttgtcctgctttacgccgttggcgtcaaaataatacagcttgccgtcaatggagcgcagaccggtgacctttttgttggtgtcctgcgcgtagtagtaggtcttgccgttctcggtgcgccagccggagtaggcgggttcttcttccttgtctgtgatgccgaacagccagttgaacagccaccggaaaaagccgttttcatcggtcaggtcgatgcactgtgcttcggcatcctccagcgcgccggaatccagtgcctgctggatctgctccggggtcagcagcacgctgccttccggggtgtgctggctggcggtatcgttctgggcagtgccgtccgctgcgggagcctgcgggtcctgtgcggccagctccggggtctcttccagcagcatggcaggggagttttcctcttccagtgcggcgtccccggcgggctgcgtcggggcttccggtgcttctgcggtttcttccggttcagacggggcggtttcagtggtttccggtttttccgtttgcgccggggcaggctcagcctgctgcggctgtgcggcgctttctgctgcctgctccggggcagtggccgctgtgctctcgg

SEQ ID NO: 13861 - DNA, 1736 bp, Unknown
  gut microbiota DNA sequence
gactgcgcccacggtcaaagtctccggctgtgcagacagcagggtcgctgcccctgcgccgcccacagccagaaccagcgccatggtcagcgctgcaacggctgccgccgctttgcggcgggctgtgccggatcggtcaaatcgttttttcatctgtcgtctctgcctccgaatctcccggtggtgcagcactgggctgcaccggacccttgccccttgcccggggcgggcccgcttttattccacgccgcccatgcgttcaggataaaaaggacggcggatgataactttactcttcctctagtatacacccgcacgcggggagcagtcaacggcgcagcgggcttctacacaaattctccaccggggcagtgtgtcggaaaatgttccaaatggaatacgttccggcggggcagaacattgcacaaagccgaaatttcacaatttttccagcaacctcttgctgtcttgacaggtgtatggtatgatacagaacatacgttcgtaaccttaacgatctgttttggatagaaaggcaagttttatgtcgaagctgaaagattttttggcgcggaaggatatcgtcatctctccgcagcgttacctcattgacgcactgggcgcaatggcacagggtctgttcgccagtctgctcatcggtaccatcatcaagacggtgggtcagcagaccggtcttgcactgctggtggatctgggcggctatgccacggccatgagcggccccgccatggcctgcgccatcggctgggcactgcattgcccgccgctggtgctgttcagcctgatcaccgtgggctactcggccaatgcgctgggcggtgcaggcggcccgctggccgtgctcatcatcgccattgtggcggcagagctgggcaaggccgtgagcaaggagaccaaggtggatatccttgtcaccccgctggtgaccatctttgcgggcgtcgggctgtccatgctcatcgccgcccccatcggtgcagccgcaagtcaggtgggcaccctgatcatgtgggccaccgagcaggctccgctggtcatgggcattctggtgtcggtcatcgtgggcgtggcgctgaccctgcccatctcctccgctgccatctgcgccgcactgggtctgaccggccttgcaggcggcgctgccgtggcaggctgctgcgcccagatggtgggctttgccgtgatgagctacaaggagaacggcgtgggcggccttgtcagtcagggtctgggcaccagtatgctgcagatgggcaacatcatcaagaacccccgcatctggatcgcccccacgctggccagtgccatcaccggcccgctggctacctgcctgttccactttgagatgaacggcgcggcggtgtcctccggcatgggcacctgcggtctggtgggtcagatcggcgtttacaccggctgggtcagcgacattgccgccggtaccaaggccgctatcacccccatggactgggctgccatggtgctgctgtgctttgtgctgcccgccgtgctcagcgtggtgttctgcgcggtagagcgcaagctgggctggatcaaggaaggcgatttgaagctgaactaaatagttataggtaaaccaccggagcatctgcggatgctccggtggttttgtttgcagagggacgccctctcagtctcgcatacgctcgacagctcccccgaggggggagcttttttgtaccccctcagtcgct

SEQ ID NO: 13862 - DNA, 4228 bp, Unknown
  gut microbiota DNA sequence
gcatctttatcaaaagcgttggcttttgaaaaggcggtgcacctgctttttgttttttattctgcgctgtaagcgctgcccatgatccacgggttacttgcggaatattttgcgtggttgcgcaggtaggtgacccatgcaccgtagccgttgccggccgaaaggtgtacgccgtccggtgcggcgatcatctctttcaggttgccctcgccgtcagccagtgcctcccacaggtccagataaacgcagcccttgctggcggccagctgtgccagctgctcgttcacgccgcgcagcacgtccgaggcaagccccggcttcttttccgctgccgcaggccgtaccggcgggatggactgcacataaataatgcagtcctctcccagcgtctggcgcagctcgtccagcatctggccgtagtaggccagaaaacggtcagatgcgcccaaggtggtcagggtgttggtgcccagcaggatatacagctttttgggctgcgccgctgccagcacatccagtgccacctcctgcccgcgggtggggctcttgacggcggcgcgattgacgatggcgtccggccccacacccgtatagccgcagatgagcgcgccgctcagattgatctgatagtccgaaaagcccaccgtcaggctgtcgcccagaaaggcagcgtccgaaaaatagctcaggtctacctgaccgcaggccggctgccggataacactggcgtcataggccttaatggtataagcgccatcggtctgccgggcggggccgaagctttccagctgcaccgcctgtgccgtgccgctgctatcggctgcaccctcgctgccgctgccggaagcagcctcgccctgcatgggcagcggtgccagaatgttctgtgcaatgccgcctgcgccggtctgcggggtgctgtcctcttcaacggttcctttttccaagatggcggtcaccgcataggcgaccagcaaaatggccacaatgacccccgccagccgcagtttgccgctgatgcccccgcgtgtgcgccgccggggtgccgaatgatactcgtgtgaaatgcccatattctctgtccagctttctgcatttatcccaacaggcaggtacttctgcccggtaattttggagtgcgcacccattttatcatattttttttgcctgtgcaaccaattgggtcttgcatacaacaggcaaaacgggtacaatagaattgcagcttattttgcacattttacaaaaagcaaatacacaagctgcaaatatttttgtgtcagttgcggcagatggctgttttgccgtcccggtccgttggcagtgcagggccgacagaccactttactggacggtgcggaaagccgtttgcccggcagcggacacattttattatgatctgaaggaggtttccatggccaagaatatcatcattggtcagagcggcggccctaccgccgtgatcaactccagccttgcaggcgtatacaaagctgcccgcagtctgggtgcagacaaggtgtacggcatgaagtacggcatcgagggtctgctcaaggaagagctgctggagctcaacgttctgctggatgaccgcatgagcatcgagctgctcaagcgtactccgtccagctatctgggcagctgccgcttcaagctgcccgacccggataccgatgccactccgttcgtcaagctgttcaccctgtttgacaagtacgacatctgtgccgtgttctacatcggcggcaacgactcgatggataccatcgcaaaactgtcccgctacgggcagcaggtgggcagcaatgtgcggttcatcggtgtgcccaagactatcgacaacgatctgtgcctcaccgaccacacccccggctacggctctgccgcaaagtacattgctaccatcttaaaggaagtcatccgcgactcctcggtgtataacatccgcagcgtgacggtggccgagatcatgggccgccacgcaggctggctggccggtgcggcctgtctggcaggcggcgaggactgcgaaggccccgacctgatcctgctgccggaagtgccctttgatcaggacaagttccttgcccgggtggacgagctgcagcgggtaaagtccaacgttatcatcgcagccagcgagggcgtaaagaccgcagacggtacttacctgtgcgatctggtgtccaccgccggccagctggacgcttttggccacaaggccatcctcagcggcaccagccgttacctttcggagctcatccacgacaagctgcagtgcaagagccgtgccatcgagttctccaccctgcagcgctgcgccagccatttggccagccgcacggatgtgaacgaggcctacgccgttggcggtgccgccgccgctgctgcctttgcaggcgagagcggccgcatgatcgccctcaagcgggtctccaactacccgtaccagtgcatcaccgagtctgtggatgtgcagcaggtggcaaatctggaaaagaaggttccgctggaatggatcactccggacgggatgcaggtgaccgaagcttttgaggagtacgcccgtccgctgattttggatgaggtgacccccgtgtatgtgaacggtaccccccgccacatccgtctgtgatctgcctttcccttccgcgtctgttttcgtgcgactgcacgtttttatagccgaaacagaaaaaacaaaaaaggagaaatcatcatgggaaaaaatgcaatcgtcggtcagtccggcggccccacctctgtcatcaatgccagtctggcgggtgtctttgaaagctgcaagaaccgcggcgcagacatcgtgtacggtatgtgcaacggtgttgccggtctgctggaggagcgggtggtggatctttccaccctgctgaccgatgacttggacatcgagctgctcaagcgcaccccgtccagctttctgggcagctgccgctataagcttcccgactggcgggatgacgaggcggtgtacaaaaagctgttcgccattctggaaaagctgaacatcggttacttcttctatatcggcggcaacgactccatggacaccatcggcaagttggctgactatggccagcgcgttggcagtgacattcgctttatgggtgtgcccaagaccatcgacaacgacctgatggtcaccgaccacacccccggctacggctctgccgccaagtacattggcgttgtgatgaaagagatcatccgcgatgccaccgtgtacggcaccaagtacgttaccgtggtggagatcatgggccgcaatgccggctggctgaccgctgccgccgcactggccaagagcgatgattgcgagggcgtggacatgatctgcctgcccgaggttcccttcaacgtggagcgctttgtggaaaaggtgcgtgtgatgcaggaaaagaagcccagcatcgtcattgccgtttccgagggcgtaaagctggaggatggccgctatgtctgtgagctggcggacgacgtgcacgccgtggatgctttcggtcacaaggcgctgaccggtaccgcacggtatctggccaatgtggtggcccgcaatctggacaccaagacccgctgcatcgagctttccaccctgcagcgctgcgccggtcacctgaccagccgcaccgacatcaccgaggcctatcaggtgggtggtgctgccgccaaggcagcctttgagggtgttaccggccagatggttgccctgaagcgcatctccaacaatccttaccagtgcaccaccgagctgcatcccatcagcgaggtcgccaacctggaaaagaaggttcccctgagctggatgaacaacaaccatacccagatgaccgaggacttcttagactacgcccgtccgctgattcaggccgagctgaccccgctgtacatcgccggtctgccgcaccacatctacatgaagaaccagaagtgattttctcctgacctgtttttgtcaggctgaaaagccctcccgtccggacgctgtaaagcgcacccgagcgggagggcttttgtgatctctgcctttatttcttctttttttgcgcccagcccaaattatgggttgacaaattgcgctttcagtggtaacatatacaggcagtccaaacgactgcaaaaatgaatatgggcgtgttcccgagtggccaatggggacagactgtaaatctgctgctttcagcttcggtggttcgaatccacccgc

SEQ ID NO: 13863 - DNA, 13031 bp, Unknown
  gut microbiota DNA sequence
catttcaaatcgtaccaccacaaaggaggccacaggatgccagagcggttcatgcggggaatcgaggccgtgaacggcatcgtgtgggggccgatggggctggggctgctcttcggcaccgggctgctgctgacggtgcgcaccgggggcttccagctgcggcggtggggctactggatgcagcacaccctcggtgccatcctgaccgaccggagcgtcaccgcccataccgcccgcgaggaacaggccatcagccagttccaaagcctgtgcaccgcgctggcgtccaccatcggcaccggcaaccttgtgggggtggctaccgccatcctttccggcggggcgggggcggtgttctggatgtgggtcatggcgctgctgggcatgatgaccagctacgccgagaacgtgctgggcatctactaccgccgcaaagacccggcgggcggctggcgcggcgggccgatgtactacctgcgggacggccttggcggcaagccggggcgggtgctggcagtgctgtttgccgcgttctgcgcgctggcaagctttggcatcggtaacctgagccagctcaattccatcgcgggcaacctgaaagcggcgtttggcgtgccggaggccgttaccggcgcagtgctggcggcagtgtcggcggtgattttgctgggcgggctcaagcgggtggccgctgtggcagaaaggcttgtcccagccatggcgctgctgtacatcgtgggtgcgctcaccgtggtgggggtgcatatcaccgccgtcccggcggcgcttgccgccatcgtaaagggcgcgttcggactgcgtgccgccggtgggggcatcgtaggctatgggctgtcccgggcggtcacttggggcttcaagcggggtgctttttccaacgaggccggacttggctcctcggtgatggtgcacgcggcttccaacgtaaaagagccggtgcagcaaggcatgtggggcatttttgaggtgtttgcagacaccatggtggtgtgcaccctgacggcgctggtggtgctgacctccggctttgtggatctggacaccgggcgcattgccgccggggcggcgggcagtgcgctggtggggcaggcctttgacgccgtgtttggcgcgctggggtccaagctcatcgcagtgtgcatcctgctgttcgcctactccaccgcgctgggctggagctgctacggctgcaaagccgtggagtatctcttcggcgcgggggcagggacattttaccgggtgctgttcgtggcgctgatgccgctgggcgcggtgatgcggctggaccttgcatggacgctttccgacaccttcaacggcctgatgatgctgccgaacctcatcggcgtaattgcgctgtccggcacggtggtgaagatcacccaaaactaccttgcccgcaagctgcacggcagcgccgcgccgccgctgttgtctgcgggtgagacgatttaaaatcgtcagccgtccccttgtcccaaggcggggtttgtgctatgctaaggggtacaagcgattttttgcgctgagaggaggaaccccatggccgccgtaaaaacacggaataccgctacccttatgaccgagggcagcattgtaaaaagcctgctgctgtttgccctgccgctgatcttcggcaacctgctgcagcagatgtacaacaccgccgacagcatcatcgtgggcaattttgtgggcagcaatgcccttgccgccgtgggctccagcgggtcgcccatctacctgctcatcggcttcagtcaggggcttgccgtgggcgcgggcgtggtggtgtcgcagtatctgggcgcgggcgaccacaaggagacccgcgaggcggtgcacacctcccttgccattgcggtggtcatggggcttttgctgacggtgggcggcgttgcctgcgggcgcgctttgctggtggccatgaacacccccgccgaggtgctggccgatgccgtgacctatatccgcatctactttggcggggtgctgttcagcgtggtgtataacatgaccgccggcatcctgaacgccgccggcaactcccgccgctcgctggtgtatctggcatgggcgtcggtgaccaacatcgtgctggactttgtgttcatcgtggggctgcggatgggggtggcgggcgctgccatcgccacagacctgagccagctggtgtcctgcgtgctgagcctgcgctttctgatgaaaagcgaggacgcctgccgggtggagctttccgccatccggctgcacagcaaaatggcaggccgcatcatccgggtgggtctgcccaccggcatccagaacatggtcatctccttttccaacgtgctggtgcaggccagcgtaaacagctacggcgccgccgccatggcgggctttgcagcctacatgaagatcgatggcttcaacattctgccggtgagcagcatcagcatggcagctaccacctttgtggggcagaactacggcgcggggcgtctggaccgggtaaagcgctcggtgtgggtcacccttgctattggggtcatctacaccctttgcaccggcgcggcgctattggccggacaggacgccattctgcacctgttcaccgccgacgaggccgtggtcacctacggcaagctggccatgcggtggttctgtccgttctacttcctgctcagcatcctgcacggccttgccggtgccgtgcgcggcacgggtgccagcatcccacccatggtggtgctgctggtctcgctgtgcctgttccgtgtggtgtggatccagtttttgctccccttcttctccggcatcgagggcgtgttcatcctctaccccgtcagctggggtctgggcgcattgctcatgatcctgtatgcgtggaagggcaaatggatggagtatcatacataatatttttacaaacaacgacccgccgcactgaaagagatgcggcgggtcgttgtttttcaggtactcctgtcggggcagcttaccatgcaaagcccacggagtccatgtcgatcttcttttccatcagccccagacggctctcgatgaagttgacagccatatccggccactgggcgatctgggtgtagtagtccacatagcccttggtgccagtgcccagacccacaccgtggggcgcatcaggtgccagatagaagctgaagtccgtgaagatatttgcgcactccggcagagcgggcagcatcatcgcactcaggccatctttctgacccacaacaccaaagaccggaggcaggttggggttcttcgtgaagttcagaccggtgacgaacaggccgtagatggggattgccacattcaggtcggcgctctcatggtccacagcatcgcagacgtagctggggtagaccttatccggggtattcgtagtgccgaactggtcggccaccacctgcatcacattcatgccgccggcagagaagcccacagcgatcatgatatcggtcttgccgatgtgtttttcagaggcgttgtggcggatgtagcggatagcgcgtgccagatccagctgctgatccacagcggcgtaggggttgacgcggcgctgcagcacaaaagcgttgtagccgttcttgttgaagaactcggccacagggtagccttccaccacgttgttgcggtgggtgctgccgccgcctgcaataatgatcacgttgcccttcaccttgccctgatctcgcagcaggtacgggttcaggaagggacggaagccctcgttatcgtagcaattttcccagttggtgggcagcggagattccacggccatctgatctccccaaatttcccaaacggtgctcttggggtccttaatctggcgcagcgccttgcgggcattggtcagggcaacacacatatcgtagtgagaagcattgatgccgggcacaggtgcaccgtccaccttctcgtactgagcacgggacagcttgtggaacagcacatagaacttgtcaaaatcgccccggaaagcagccggataaaaggccacctcgcgggagagacggagttcctctgccaccatggcctgcacctcagcatcggtgtgcacgccagcgttttcagcaaaggatgcgggcgccatgccagccactgcgcccatggtcacagcagaagcggcagaaagcttcataaagtctcttctgttcatcatcatttctccttttaaatgcagacggctcatttgtgcagagcaaagccgcccaaagctgtgcagcaaacgccctgctgccgggcccgatagacattccagttgtatcatgccatcgaaatctgcacaaatcgtaccacaatataacgagcttgtaaatagattttgttgtttttgtgtgaaattgatatattagtatgtcagttcttgtgaaaatcaacaagcatgagaatgggtacaaaaaaggactgccgtgcactctgcacggcagtccttttttgtattattacaacttttcaaacaccagaaagcggaaagcgatggtagtggtcagctgcggcagagccgcaaggcgggcagcaccgtcgcggggcgttttccagtagtagggggtcatggcaaacagggcttccagctgggcggcgggcacggtgatggttccctgcacctcacgctcatcaatggcgcggaagcccgggtactccacctgctgcaccgggtttttgtagggcttttcgtagagcacggccttcatctggtacagatgctctgcccccggcacaacgtagatcatgtgcccgcccgggcgcagcacccggctgaactcctcctgcgcaaagggcgaaaaacagttcagcagcacatctgcccagccggtgcgcaccggctggctgaagctggacgccaccgcatactgcgcggcgggcagcgcctttgccgccaaccgcaccgcgggctttgcgatatcgaacccggccagctgcaacggcttttctgccgccgcgaactgctgcgcgatgcagcggtcgtaccagccctcgccgcagcctgcgtccagcagatgcagcggggcgtccttcgcggcgggcacgccgtgggtaaggcacaactcccccagcgcctgcccgaaaatgccgtaatatccggcgttcaggaaggcgcggcgggcagctaccatctccttgctgtccccgggggctttggttcgcatactctgcaccggcaaaagatgccagtagccctcccgggcgcggtcaaaacagtggcctttttcacatttcaggtcattctccccttgcagcgcgccgccgcacagggggcactgccacggggcaaaggcttcgttccggctcatacttcttcgctgtgatcctcaatgggtgcagtggcaccgccgtgggcgtccatatactcctcaaagctggtgtacttctgctggggcgggcggcggctgatgagcaccagccccgggtcctcgtcccgggcggcagcattgcggccgcggcgggcaggctcggccttgggagcgcggggtgcgctgccggtgcggctctgattcccggcattgccgcgctcgttgcgggcagggcgggcgttattattctgggcagcggggcgggcattgcgctgttcaccccggtcgctgcggtcgttgcggcggctgccgctgcggtttgcgttctggttattctggggctcctgtgcgctgcggatggcgggtgctgccggagcaacaggagtcttgcgtgccgggcgcagcggagtagcctccggggcgctgacaaaatgggggtcaaatttgggctggacgttgctgcctcgggcgggggcggcattctcgcggcgggcgcggggcgctgccgcttccttgggggcgtttgcgccccggttgttggcgcggcggtcgttgcgggctccgcgctttgtgttgctgtcttgcatcagtgtttcctcttttttcggttttgcaggcaccgcgttctttgcagccttcggctcctgcttcggcgcgggcgcagctgtctttgcagcttttgcgggcgcagtttcggcctgttttttcggcgcttcggccaagttttccgcttcggggcggggctttttgccacgcacgggcagcaccgggcgcaccggggcgggcacgccgtcccacggatgaccggataccaccgggatcttgcggcggttcagcttttcaatgcctgccagatactcctgctcctccggggcgcagaagctgacggcggtgccgtccgcaccggcgcgggcggtgcgcccgatgcggtgcacataggtctccggcacctcgggcaggtcgtagttgaacacatgggaaagctcgctgatatcaatgccgcgtgcggcgatatcggtcgccaccagcacccgggtcttgccggacttgaaatcctccagcgcggtgacgcgggcggtctgactcttgttgccgtggatggcggcggcggggatgccctgctttgtcagatcctttgcgatcttatccgcgccgtgcttggtgcggctgaacaccagcgcattgaccaccggcggctgcagatttttgatgagccacggcagcaaaagctttttgttgcccttttccacatagtacaggctctgctggatgcggtccacggtgctggacaccgggtctaccttgacaaaggcggggtcgcgcaggatgccggcagccagctgctcgatctcggcgggcatggtggcactgaacatcaggttctggcgctgggcgggcagctttgcaatgacctttttcacgtcatggacaaagcccatgtccagcatccggtcggcctcgtccagcacaaagatctccaaagcggacaggtcgataaagccctgcccgatcaggtcgttcagccgtcccgggcaggcgataaggatgtccacgccctttttcagcgcttccacctgcggtgcctgtcccacgccgccaaagatgacggtgctgcgcaatttcaggtactttccgtaggcttcaaagctttcgccgatctgcaaggccagctcccgggtgggggtcaggatcagggcgcggacagcacccttgcggcggggcgcattggcggtgagccggtccagcatgggcagcgcaaaagccgccgtcttgccggtaccggtctgggcgcagcccatcagatcccggcctgccagcaccggcgggatggccgctgcctgaatgggcgagggggtctcgtagcccgcttcctgcacagcacgcagcagcggggcggacagattcagttctttaaatgtcatggttctcctattattctgtgatcttccggcactcgatgtagtagcgcttttcctccgcgtgtcccatgctgaaggtcttgcggggcagcacgccgcccatcacaacgccgcggaacaggtcgctcttggcgaagggcggcatcaaaaacgccactgcgccctgcttgcacaaagcgcgcacagccggctcatcatgcacatagtccacctttgcttccgggtggcgctcgatataatccgaaataaaatcgtcgatggtgccaacggtcagcggctcggtggggtcctcaaagctgagcacattggccatgtgggggcctgccagcgtaaagggctgctttttgctgccgccaaagcagcagcctgccatgttggaatcgctccatgtaatgaggctcagtagcacggtggcgcagtccacgttgaacagtacccggtggatgggctcgatctcgatggccggggagtgcacattgcacacctctgccaagcaccagcgggcggggtggttttctgcctgctccggggtcagagtctttttcagctcctcccagcaggcctttgcggtagccagcgagtggttgccatcgcccacggccagcgtcagcgggtcgcggcgggtggcatcggggtatttcttgtcaaattcttcctgactgcccagcacggtcagcgcattttcgatctgtgcgatgagggcggggtcctccaccgcccagcctgccacatggccgccgcccagcatcagctcgccctcgtataccttgggcaggctgtccttgtgggcggcaatgggctcgatgagggtgcagtccgggtcatcggccagcatcatgatatggggcgtttccagcgcagcgccggtacgcaccttcatgcggggcgggatgcggctttccacggtgcactcgctggggcgcacggtgcatttttcgccccggcggtagctgtaagcctccaggtccacacgccccacaagaccctgccgcacccggccgctctgctcggtgcgctccacatagataaagccgtccaccgcccgggtgagcacatttttggcgtaatcctgcatggtggcgtggatcttttccacccgcgcgtcggcgtctccgtcctccagatacacctccggcaggatcaggttcagggtgctgggcgcacccgcagcggtcttttctgcccgctgccagtagctgcgggcactggtaaactggtcacaggcgatgcagccccactgctccagcggcacctgctccgaaggcagcaggatgtgtgcgggtgcaaaacaggtagtcggtttcatagtcgtttcctcccctctttaaaagccgcttctcagcggaacgctgtggtgtcgtgcaccacaaggtgctgcacaccggcgtcggcagcggcctgctccagcgcagcgcggctgtccgcatccagttcggtactgctggtgaccagcagattttccataccaagggacgtgccggtggtgccaagggcatcggtggcagcggtgcacagtgcgtcagggtagctgacccacagggtcacgctgcctgcaaagcgggtctgccatgcggcgatatcagcggtcagctgggcggcgcgtccctcccggctcttgcctccggaagcgccgaagtcctgcttgcgagtgataatgttggggaactgcaccccggtaagcaccacctgctcgtagcccatgccctgcacctcctcaatgaggtcgccgatatactgcaccgcacttgcggcaaaggggttcatccacgccttgccgcccttggctgcgctgacgttgtccagccagaggctgttgccgtcgtagtgcacgcccatgctgcggtcggtgtacaccgacaccgggtcggtgaaggcggcaagctgcgccgccgggatgatgccctcttcccgcaggatggcggcgatattggccgcatccaccgggttttcggtgatgctctgggcagcggctgccaccccggaagcgtagtacaccgtgccagcggcgtctttcagggtgacaagggcgtagtctgcgccctgctgcttcagctgccgggcggcggtgcggatggcggcttcatcggtcagggtggtcacgtccagctctgcccagctgccgccggtaatggccttgccgtccagcggcttttcctcctccggctccagctcagacgctgcctgcgaagcagcagcgctgcttgccgccgcagaggaggctgctgcctcggcgcgggaagcgctttcggcctccagatcccgatccttgaccacggtataccaggtgtgggtggcccaatccagcacatggggtgcggcaaaccatgcggctgccagcactgccgccaccagcaccacgatgccgatgccgcgctttacgcgcgtttccctgctgtaaaagctgcggtgataatgcttgaccttctgacgtttattcttagccatggtatcctttcctccctgtctgcattacaggatgacggaatgtccggtaaagccatagatcgccagcgccagcacgccgatatacaccagcgtgatgggcaggccgcggaatgctttggggatcgctttgctgcgcaggcggtggcgcgcctcggtgaccagcagcaccgccagcacatagccaaggccgctgccaaggccaaagccaaggctctggccaagggtaaaggactgggtgcgctccaccagcaccgtgcccagcacgccgctgttcagcgcggccagcggcacgatgcgcagcagctggccgcggcggggcaggctgcgcagcagccacagcaccagatgctccgccagacacaccacggcaatgctggcaatatacaccagcgggcgcagctgggcgcggttatccagcggggcaatgaaccgcccggcaagaaaagctaccggcgccaccagcacctgcgtgatgcacagcatcatgccgaacaaggcgctgctggtgcggtcgtcccccaccagctgcaccatgcgggacacgcccagtgcacgggtaaagacagcgttctgtgcaaaaatggccagcagtgcatagctgaaaaacactgccgagctgcttacaacttccttcactgttcgcggttcccctccttctggtagtgcacggtcagggtatcccgtgcttcctttttcagatattccttgcgctttgcagccgcagcgcgccagatggcgcacaggatgcccagcacgataaagccgcctgccggcatcttagccagcggcagcagcgcccagcgtcccaccggggcgccgaacacggtgccaaggctgagccactcgcgcaccacgcccaccacgagcagcagcagcgcgtagcccacggtgatgcgcacgcccttggaaacggccttgtgcaccgtctcctgcacgcggccgaagcggtaggtcagaagcggctccaccaccagcatgggcaggtagatgccaaggttcaaaagcccggtgccaaacacgaagttcaaaatgggatatgccgccaggtacaccacagcggcgctggctgcgtacaaaagtgcgcggggcagcagctttttttgcagctgctccggggtaggctcctcgtcccgcaggggtacaaggcggctgagcaggcaggccagcacgcgggagggcaccagcagcagcgccaccgccgccgccagcatcaggccgttctgcccggtggtagccacgaccaccagcggtgccagacccatgccctgcatgaccaccgggttattcaggaacacgcggtcatgatgggcaaacttttcggggtcctttaaaatcagttccgcagtacgctttttcattccgcagcctcctttcgttcggacggcagacggtgcagcagacggtacagccgctcctcggtgcggtcaatgagcgcggacacgctgttgacggccagcagtgcaaagcagacgccggtctcgtacacgccgaaatagcggaagcccatggtggcagcacccaccagggcgccgtacaggatgcgtccgagccggtgatgggcgcaggtgtagggttcgttgagcaggaacaccgcacagaacagcaccgcaccggtgtgcagctcgtcccggatgccctgcaggcggggcagcaggctgctgaagagggtgctgtccgccagacccacctgacgcgggaagaagaaggcgatgagcccgcaggtgatcagaaaacttgccgatgcgccgatgtgcacgtccttctgggtccacagcacgaggccgcaggccagaatgaccagtgccgcaccggtgcccatgggggcagcaaactcgcccagcacaacggcgagggcattcaggttcaggatgccgccgctgcgcagggtatcctcgatggtgctgctcaccggcacggcagaggcgttccacaggggcagcggcgtatagggctgcgggtagcgcaccacctgctccggccacgataccgccgccacggcgtagcccacggcagcggggttgaagggatagctgccgtagccgccaaagacctccttgccgatcaatacgcccgccagcactgccaccaccagcacatagatgtccacggtggcgggcatgagcagggcgatgatcaggctgaagctctcgttggagagatctttattggtgtacacccgatggcgcagcagcgccaccagacggtcgcacaggttgccggtaagcagggcgatgccgcacagcagcagcggacgcgccccatagaaatagcaggccatgcacagcagcggcacacacagccagaaaacgtgcttgtagtaccggccggtcttttgcagctgccgctcctgctcttggatcaaagtttcatccatatacgggcctccttacaggctggccagtgcgcccacagccgcagcagggtcggcggcgccgaacacggcactgcctgccaccagcacgtcggctccggcttccacgcacaagggtgcggtggcggcatccacgccgccgtccacctccagcaggtaggaaaggccgcgtgcttcccgctctgccttgagccagcggagcttgtccagcgccgagggcatgaacttctgcccgccgaagccgggctccacgctcatcaccagcaccagatccagctgctccagccacggtgccagcgcctcggccggggtgccgggcttgatggtcagacccaccttgcagcccagcgcacggacggcgtcaatggtggcctgaatatcatcttcgcactccagatggaaattatacagggtcgcaccggccttgataaagggctcggcgtattgcagcgggtggctgatcatcagatgcacgtcataaaaggcatccggcagcgccttgtgcaggcttttgagcaccggcacgccaaagctgatgttgggcacaaaatgcccgtccatcacgtcgtagtgcagcatctgtgcgccggcgtccagcaccatgcggcagtctgcacccagcttgccaaaatcagcagaaagaatagaaggacttacgatggccataatatttcattacgctccgttatttttagcaatttttatcccatgtgttgcgcgttttgcagggttctgccgggcaaaaaatacgcgggcatggttatcttttagtttacatgaaaacggccaaaaaatcaaacccgcagcagtttttttcaccgaaaagtcgtaaatggcgtaaaaagtccattgcgcggcagcatctccatgtgacgcgcagctgccgccgaaggcttgccattttgcagcagctttctttgaagcaggacgatttggaatggcctccgcgttgctctggccatattcagcggaaaatag

SEQ ID NO: 13864 - DNA, 10031 bp, Unknown
  gut microbiota DNA sequence
cggagtgctccaaacgcattttcacaagagggggtcacagcggtaagcagaatttttattccaacaacgccaaagcagccagaccgcccgggcggggcagtctggctgcggggtcttattctaccggcttcatgctggcgggttcctccactgcgccgggctgcccggcggcgtccggcaggcgcttcatgccgccggggttgggggaacaggtgggcagggtgaatacaaagcggcaccactcgccctgctggctctccacgcggatctgcccgccggacagattgaccagcaccttgcagatgttcagtccaaggccggagccgcgggcgtgcaggccgcgggagcggtcctccttgtagaaccgctcgaacacatagggcagcgcctccgggctgatgccctgcccggagttccagatggagatctcggcctcgggccccagcttttccacgctgaagcggatggtgccgcccgccggggtgaacttgatggcgttgtccagcaggttatacgccacctgatggatcaggtcggggtcggcatagaccagcaccttttcatccatggtcaggccttccagctcgatcataccatcgttgatgcgctgctctgctgccagtgccacgccggtcagggtctcccagatattgaacatccgggcgttcacctgatactctccgctttccagcttggagagatccagcatattctggatcagccgtgccagacggccggtctcctcgctgaccagctgcaggtagtggttctgcatctcgggcgggatggtgccgtccagaatgccgtccacaaagcccttgatggtggtcatgggggtgcgcagttcgtgggcgatgttgcccatgaactgaccccgggagttatcgttggactggatattctccgccatctggttgaaggtgcgggcaaggtctgccacctcgccatcgccctccacgccctccacgcggacagagaggtcgccgccgccaaagcgctgggcggcatcggtgaccttttgcagcgggtcggtgagctgacgcatcaacaggcgggtcagcacgctggcgcacagcagcatcacgcaggcggacatgaggaagttcgaccagaactgctgtttaaagtcggtgagctgcgcgccggaggagcacaaaaacagccagccgctgaacaggctctggtcgtcgatggtctccaccgccgcgatatagcttttttcggtcagggcaccgcccaaatcgccgaaagcgtggtagtgccgggcgtccgggtcagccactgcgttggcgcgctggcagatatccagcggcacggtggtggtggtaagcttgtccgggtcggaggcgatgagcacattgccctgtcggtcggtgaaaaacagataagcctcggcgctctcgccgatgatctccagcttagtgttcaaagcgtccagctctgcgccctgcggcatggtctcgctgtttaccagatactctgcggtgcgcttggcgacatttaccacctgatccagtgtttcgtagcgatccttcgcaaaataattcttgaacagcacccactccgagcagcccatcagcacgatgcccagcaccatcagggtggacaccatggagaaaaaggctgtggagatacttttacgcattactgacgcacctcgaacttatagcccacgccccagacggttttcagttcccacttatcggaggcaccggccagcttttcgcgcaggcgcttgacgtggacatcaatggtgcggctgtcgccgtagtactcaaagccccacacctcgtccagcagctggtcgcgggtgtacacgcggttggggtgggaggccagacagttcagcagttccagctccttggggggagcttccaccaccttgcccttgacccgcagctcgtagctgttcatatccagccgcaggttgtcgaactcgatgacgccctcggtactctcggcggcagcggaggtagtctggcagcggcgcagcaccgccttgatgcgtgccaccacctcttttgcgtcaaagggcttgaccatgtaatcgtctgcgcccagctccagacccagcaccttgtcaaaggtctcgcccttggcggtaagcatcatcaccggggtgttgcccgccttgcggatgcggcggcagacctcaagaccgtccatgcggggcatcatcacgtccagcagcaccatatccggcttgaccgcgttgaacttttccagtccttcttcgccatcgtttgccaccgtgacctgatagccctccttggtcaggtacagccgcagcagctcgcagatgttggcatcgtcgtccaccacaaggatcttttcgtttgccataggtatttcctccccttttatgcaggtttttgttgtatttgcagcccttccgggcgttttggcagtctcttactcttctattatacgggacagttatgacaaaataaagaaggaagtgtagtttttttcacatttctgcccgcgcggcggcaaaaagccccttggcgctgccgcgccaaggggcttttgttacggttcttctgccgggtcggggtctacacgccaaaggcgtcgtccagttcctccggcagggggtcggggtctatgccaaaggcatcgtccagcgcctccggctgggcggcggggtctacgccaaaggcatcatccatgccctccggcaaggggtcagggtctgcgccaaagtcagcgtcaaaaccatcgtctacccgctccggcggggtatcggggtcagtcgggacaaagggttcgttgtctaccacaggcttcaggtgttcgggctttttccactgggcgtaaaggtctaccgtatcgccatctgcccagtcggtcacgggcacgccgtttaccctgtacagtctgcctgtgccgtccggttctgtgttccagcccacaaaaacgtagccgccgcgcttaaacatacagttgcgcagcacaacatcctcgccgggctggtagcgcacggtctttaccgcttcctcaagggcatcgtctacgtcctccggcagggggtcggggtcaaaaccaaaggtatcgtccatatcctccagcagggggtcggggtcaaggtcaagcgcaagttcctctgtcggatcaaaatttgcatggtagcgcagggtcagggctttcttcgccggggtaaggctcggcccgggcatgggggtggtggagccgggttttgtagttgaggtatagaacataaacgccactcggacagggtcgccggtgtaaccatcatctttaagggcacctgtgtccttataatagtgaatccctttttcctttccggtcatgtggctcgtgtacgactttatgccagtcttcatggcatcgtcgccaaacagcttcgttatttcatctcccgccttgagcgatttcaaaataacagcatccattgcttggtacaagtcaattccggtcatcatatcaaccgtatattttgcgccgtagttcagacccacctgacaatgggacttttgggtcacacccaaatcggttttgccatcatttatcgtgacatcaaacgttccaaattccagtttgcccgcttttgttgcaattcctacaacatcatctgtaccagcgatatttgtgctaatgaccgacagcaaatagcgcctgcgctggatcgtcagcgtgcgtgtgcccgttttcaagtccgctgcactgatcgtgcactcctgcgtgaagtcataaccatgaccatcttctgtgtactggtctatcttccaaatctttctttcaaggtctatcccggtttttgtatcgtcgtcttctgcgtcaaattttgcttgcttggttgccttatcaattgccgccgttaccttagggtcggtcaaatccagcgtccagcccttgtcctcatccaccgcttgaccttcgagggtaaaagagtagcctaccatcgtaccgccacgcgtggcaacggggcccgtaccatcgttcgtggagtagcccttttcgtcctcaaactgcacggtgatatcatagccccaaatggcgtaaaaatgtttgggggtagccgtagttccccaattgacctgcgttaccggcgttccgggctggtagagttcggttttgctggtgggtttttgctttgtgctccatcccgcaaacttcatatcggcgtgcgtactaccgttaaacaaggcatcgtactccgggagcacatcggtctccttgtactctttggtcacactgtcctcagtgccattgttttcatggtaaataatcgtgtcgttccggaagcaggggttaaagcagtagcgctggcagttgcccggggcatggaagttgccgtcgccacccgtaggtcttgtatccgcctcctgcggttcatctatcagctgacctttaaagattttgtacgccttaccatcgaccgttctatcctctgtggtgcaatcatcgttgccgtttgcaatgaccttcacgtttccttcttcgtctgtatcgtagaggtagcccggcttggggttgtagaagccaatttcaaagttcgttccatacgggaaagtaccccagtagtcgtcaccgttcttataactgaaccattccgaccaactgtttttctcatccacagaaacgtggatgtccagataacagccaactccatctgccgctaactggttgccgtctgtcttgtgtttaagagttccatcatagccaacaatgccgttcacatccagccagtaccacttgcgcacaaggttcaggttgatggtctgggttttatggtttgcttcaaaatccgctttgggggtcagggtgcgcgacaaatcctcccagcagcgggtatcttcctccccctctgttccgtcaggtcgggggcgcgtccatacctcagaagtaacagcagtttccaaaggcattccccacgcatttgcacagccgtactccaaaacataggtttccttaggcttagaatttgcgtctgtcagctgcccggtggcgtcatcgacccggttcgttgccgtaacatggggcgtattattcctgttgttgatttccagcttctgctcatacacgttgatggtataggtaacgcactgttttaccaaatcaaaagtaaaggtaagcgtatcggagtaagtaccgctcatggtagcttggctggggtctgtcacgttgacagaaagggggatggttgctgtgtgaaagtccgtaacagcggatgttgcatacataatttcatgcgtgctttcatcataatgccacattcctccggtcgtgtgttccccaccagcttcaattttatttttcagcgtatactccaccgtgggcgcatttgcaatggctgcaccctttgcgtcatatttcagtttccaattatttggcgattcaatgccgatattcaacgtgcggtactgcttcagctttgcattaacttccagctcacccttattctccccgctctccaccgtcacggtagtggggatggtcacctgatagccattggttgcaatatcaccgatggtggtggtgtcctctgccatggcaacattcggctcgtaggcaagcatttcctgctccggcagggcggcgagcacatcggcaaattccggcgtttgggcaagcgcagttccacccaccgcaaggcacagagccagcgcaaacgcaaggcccagcagtttttttgcacaatgcttcatggtgtatcctccttgtgtggggtggctgttttttgccgcaaaaatcaaaaaaggggagagggaacatctcccgtctcccctttgggctcaggtattatttaggtggggtgggttaggtggcgatgcttgcggtaaactgtacattgcccgtgtaagtacctgccttctcggaagtgccagtcgttgccgtagacagctcgaactttaactttgcctcagcggtgtttgtgccagccggaactgccaaaattgtcttttcggttccggttgtaccgattttcctgttgagcgttttaacatcgcttccaatcgtcgtatcggtcagcgtaacagtatatttcaactcaacaccctcgtcgttctttacactaaaatcagtcgaaccccctgccggttccaacgtaattttcaagaacttaccactaataacattcttagtaacaataactttgggtgctgtaccgtcagtaccagtggaaggtgtattagtaccatctttatccaaggtagtattgacctctctcttctcattgacgcctgcatccttaccaaagtcgatcaatgccggaactgtccactcataagcctcagttaccacgtacttaacctctgtcatactcggtccagaccccttgctgccaggaagagaagtaccagtcgcaaacaccggcattgcgcagacggacaccgccagagaggctgcgaggagcagggcggccgctttcttcgtcaatttcataatccttattcggcaatggggcccgcagctgacggtcagccttggatttgcctactcctttcacaccatatggtttgttgatccccaattcagttctttttttattgtcaacactgcctgtcttgcccaccgcaagggggctcagcccacggtcagtgtcagctttacgatgccgctgttggtcttggtggtgcggtccgaaagatagggctggcacaccacataggccgggtactcgccgggggcaagggcgcgggtcatctccatcttttgcacatacaacccgggcgctacaaggccggactggaacagcagctcgtcgccgtcctctaaatacaacccaaaggcgatgtagtagcactcctccttgccggtcagggtaagggtgtactgcttgccgtcatcggtctgcacggtcagggtcttttcgcccttatagcccttgacggcctcaatggtgtacgccccggcgtcggtcttttggatctcaaaataggcggggtcggcgtccagcacctttgttacctcggcctgaatgcccgccaagcgcaggtaatggctcagttctgtggtctggccgctgtccaccaccagcttttccagcgtggtgccgtcaaggcttacccagtcctcgtaccaaaggttctcggcggggttatggaactcgaacccctgcgtgatctttttggtctttgcggggatggtaaagccgccccagcccggcagggtgacgtttttgctgcggtcgatgggggtctccggcttgacgtactgcgcctgataagtctccatgggcagcgcggctgcttcggacgcgccgttggccgtggcagcggacttgccgccggacactgcgatgtagccgcccagcagcaacaccagtaccaccagcaccccgatgactactctgcttgtgtttttgttctccatgggctccacgctccctttccatcagaacaataaaaaagccgcccgaccttgtgggcagctttgatgatacgagcaaaatccggcgtgcccttgaaaagaacacacctgtggttttggacgattccggtatgcagagtatttccgcaaaaaaaccggaagcaaccggctggcatcatccgggaaatgccccgaaccttagcccctatggctttgcgtccttgcctttcgacaagtttgccaaaaaattgcccaatatttttaaagattgatacattagttttgtcgacaatagtttatcatacccccccggtgtcaaccggttttaccggggttttgtttatattctatgttgtatttttcagtaatgcggccgaaaacgtttacattttgatgctctctttgtttcatttcctttttttgtaaagtccggaagaaagtggctggggagccctttcaggcgctgcgcgccggatctcccaaggggaaaaggctcttgtcccggttcaagccgcaaaaattgatttccgtgcccctcccccttgcgctggcggggttcagcgcgtataatgatagatgtatcgttatgccaaaaaacgtgtaaggagcgtattttatatgaagttaggtatcgtcggcctgcccaacgtgggcaagtccactctgttcaacgccatcacctccaccaagaatgcggaggctgcaaactatcccttctgcaccatcgagccgaactccggcatcgtggcagtgccggacaagcggctggacaagctggccgagatctggcagaccaacaaaaagacccccgccatcgtggagttcgtggacattgcaggtctggtgaagggtgcaagtcagggcgccggccttggcaacaagttccttggccatatccgcgagtgcgacgccattgtgcacgttgtgcgctgctttgacgatgacaacatcatccatgtggtggaggacgtgaccaaggccgaggccgtggaccccattgccgacattgacgccatcgactacgagctgatcctctccgaccttgaggtggtgcagaaccgcgcaggccgcatggcaaaagcggccaagagcggcaacaacaagggcgctgccgccgaggccgcatggctgcagcagctggccgaccatctgagcaccggcaagcccgcccgcagcttcgattttgatcccaccgacaccgagcagcagaccgtgctgcacgagatgggtctgctgagcgcaaagccggtgctgtacgcctgcaacgtgggcgaggatgacctgatggagggcatcgagaacaacaagtacgttccgctggtggctgcccgcgccaaggaagagggcgcccgctacattcccatctgcgccaagaccgaggaggacattgcggattacagccccgaggaaaagaaggcatttctggccgagatgggcatcgaggccagcggtctggacaacctgatcaccgccagctacgacctgctgggtctgatctccttcctgaccgacggcaagaaggagtgccgcgcatggaccatccgcaagggcaccaaggctccgcaggctgccggtaagatccacagcgacttcgagcgcggcttcatccgcgccagcgtcatcggctacgatgatctggaagccaacaacttcgactacgccgccgtcaaggccaagggtctgcagcgcaccgagggcaaggagtatgttgtgcacgatggcgacgtcatcgagttcctgtttaatgtttaaaggagtccaccatgatctttggtattatgggcgctatgcccgatgaagtagaccagctgtgtgcaaagctggaaaatgtcaccgttgagccctacggcggcgtggagtaccacaagggtacgctggccggcaagcaggtggtggtgtgctgcgccggtatgggcaaggccaacgccgccgctaccacgcaggtgctcattaccaagttcggcgcggagaagatcatcttctccggcattgcaggcaatatgaccagcaagatcggcatcggggatgtggtcatcggcaagacggtgctgtaccacgacgcccagctggatatgatctgccagaacccgccgttcctgaaggaatacaccggcgacccggaactgatcgccgctgccgaagccgcctgcgccgaagccggggtaaaggcactggtgggcaagatcgccaccggcgatttgttcgtgggcgacagcgagaccaaagccgccattgaagccaagtgcgccccggactgcgtggagatggagggcgctgcggtaagccagatcgccgccaagaacggcgtgccctgcgtcatcctgcgcgccatgagcgacaacgccgacgaggacggccacgaggtgctggtggtgaagaagttctccatcggggagtatgtcgccaccgctaccaagatcgtggcagcgatggtggaaaagctgtaaaagtcttgaaacaacaacagccagaccggcaatgccggtctggctgttttgtgtttatgtcagtttttggtcaggtctttggtatacagggcgcgggtggcgttgagcacggcaatgaccatcacgcccacgtccgcaaagatggctgcccacattccggcaatgcccagtgcgcccagcagcaggcacagcgccttgatgcccagcgcgaacacgatgttctggtgcacgatgcgcagggtgcgg

SEQ ID NO: 13865 - DNA, 1200 bp, Unknown
  gut microbiota DNA sequence
tcccggatattctccggcagacgtttcaaagtctcgtcccgcagttcctgcggcatcccgtaaaaagcttcggcaatgccgccggtgatgcaggcaagggtgtcgctgtcgccgcccagagagaccgcattgcgaagtgcatccctttatatcaagtttcacctttgaaatcagagagaatcatagtattgatgtattttctcggccatcagttcccgacgcctttgtagaaaatcctgatagtcgccaatctccatgctttcaaatccgtctggaatacaattctgtttaagattttcagccagcctatcttgttctatgattccaccataaacaggctttttcgtattgcattgccctatcacttcagtcatatagtgggctggcgaactatctttaattttaatgttgatttcctgttgaataaaagcataattcgcaatttgattgtattgtgcttgcacaattccattttttatcaagtaatttttcgggaacaaatggtgaatatcgcctctgttttccaacatggactcaatatcaatttccatcgacaaaaagcctttatcgtgtgccttgacctgtgccacaaggaacatattgaaatatggactgctcgcaaccgatgtgttcagccgttgaacaagattcaccttccagtacgcctcagataattcgcccgcctctgtgatattcaggtactgcgtcggatcatcataagcaaagaatctcttaatgtcgtaatcaaatgcagactctggcgagccagaagaatatcttcccgtcaaaatagacaaagccagccacttgcgtacaatcttttcaatttgattactatccacttttcgttcacgaagtgcaagaaaaagcgcatagccaaagttcaaaacattttgtgaacgaatcagcgattttttcacaattcccgctgagcgcacaatcatcaaataccgttcgtaatttgtctgattcaccgcttgcagaactgcctcatgtaattgattgaacgacctttcttctatttcgatcttaaattcacgcgtttcaaaatctcgacctgaaagcaagctaaccaaatctgctagctttcctcgcttgaatttatatgtaaatgcaacacgaagaatatccgtataacatgtgcgataaatcggtgcattctttgcagctgcccactttatagcttcgaattccggtctc

SEQ ID NO: 13866 - DNA, 2271 bp, Unknown
  gut microbiota DNA sequence
ttagattcagaagatcaataaatccgcactcgttcccggcaaagagcagcgcacaaaaacccacataaaggagatgcttccccatggaatacaaacgttttggcaataagatcattgtccgcatcgacaaggacgaggagatcctagaacaggtcaaaaaacttgccctgaaagaaaacatccgccttgccgccgtgcaggcgctgggtgctaccaacagcttcacggtgggcgtatataatgtggtagaaaagcaatactacgccaacagcttcagcggcagctttgagatcgtgtccctgaccggcaccatcaacaccatgaacggtgaattctacacccacctgcacatgagcgccggaaacgacaagggcgaggtgttcggcgggcatctgaaccgggcggtggtcagcgccacctgcgagatggtggtggatgttctggacggcacggtagaccgccaatacgaccccgttaccgggctgaacctgttcaagttctgagcttcttttcaaaaacgagaaagaccgctgcgcgatgtctgcgcagcggccttttgtttatagctcttcccggcgggtgtagggcgtcatgccgtggtcggcggggtcgtaggcttccagcacggtaatgtagttttcctgaaagtggcacaatacggtctttaaaatgccgctcagctgcccctttaccgtgatggtggacaggacaaagtctgccaccagctgcaccgtctccggctgcagctcaaagcacaggcccaccgccagcatagggatgacgatctgctgcgcctgcagcggcaccgcgctgcccagcttttccagtaccggacggctcagcgccgaggctgcctgtacgcagcgctccaccttttcctgcgggaagcgctgcatcagttccatgctgcgcagctgcgccaccacggcggcatcatcgcgcacgatgccccgggtcacttcttcctccgtgcgggtggtcgcgcattgcagcatacagcgcatggcgtcctcgtagtcctcgtagtaggtctgacggtcgcagaacaggtccagcatggagcgcagcacggcatcggtctcctcggagaccgccagccgcccgaaatctatcggcgtgccttccatccctgcgctgcggtcattcagcgcctccagctcctccgggatgaccgtggaaggcagaaagcggtcgttgccgttgcggtaaaagccccactctgcgggcaggatgcgggggatgacatcgccgctggaaacgatattgaagatgttgctggtaccccagttctttttcaggctgccgtctgccgcgtggttgttgtcataatcctgctgtaaatcggggcagtctgccgccgtcagggacgccggggcggcaaaggtatagacaaaggtgtttttcttttccagctgcggcagcacggcgggcaggcgcgccgccacaaggttggccacaccgccgccccggctgtaaccgcccatccagagcttcagggtgcccagcggctgacgctttgccgacgtctgaacgtatcctcgtattttttcaaccagctgccgcgccgccgtcacaaagccgacgtgggcgctgcccggccctgcatgaaggttgccggaccactcggccccgtagccggagccgcgcaggaacgccccgataatggtcacctgcctgccgccgcgcaccagcgttttgcgggcgatggcgcagcccacggtgtccggggtgtcgttcaggctgtgggtatagttgaacagctgcacctcagtaaagcccagctttgcaaaggcgtcccggatatggtcggcgcggccgacctccccctccatccaatagcgctggtcgctctcccacgggcagtcggcggctgccgccatgcccaaggtggccagcgccagctggttgtcgtactccgtggccgggtggtcgaacaggctgtcgctgtaatagtagtcgtgccgcaggtcggcaccgcagcggtcgctgcggtaccacagggtatagtagtcgtccggcacggcgcggccaaccagcgccgtagctgccccggcctgcggcagcgccgcagcgggtgcaagcgtccccgctgcaaaggtcaccgcaagacccttacaaaaatcccgtcgtttcatggtttcatcccccgcatcctgccctgcggcctgtgcaccgcaggcttttttatagtataaacctttttgccgccggatgcaatttttacttgcggcggcagacgggacgatttagaatgccctccgcttacgctct

SEQ ID NO: 13867 - DNA, 1400 bp, Unknown
  gut microbiota DNA sequence
gtcctgaaaaagcttctggcagacggcgtgagcgcggaagaaatccttgcaaagctgaaataacatcaaagcccacagcgaacaagtacgaacttgcctactgtgggctttttcagtgaagataatctttacgcagcatcaaaccggaaataccgtggcagcttgaaatgcttgataaacgcatgatgctgggcgtggtagtgacgcagatcgtaccccagatgatgcagttccagcagcttcaccagcaccagattgaggtgaatccgtttcgctgcagaaatctgagcagcatccagcccgcgcttcgtcatttgatagacttcatcactgtccagcatcaggtgggatgtgaaagcgttatgctcgtaaagaaggatgtgcttgtccttaatggtcagaaacttgtccagggtatgcaagtccataagcagctgatgctccagataatgccccagcgcatagccgcacaccatctgctttgtctgtttgtctagctggcgattgataaggatcaatggcttatcaaaatagagcgaaagtaaacccaacatatctttaatgcgggatgtttcactgatgtccagactgcaactgcgcgcaatctgtttgatgttgcgagttccgacattttggacaagttcgttggcggcttggtgaataaatgcagaatccataatgtgatctccttccggggatagcatagtgaatagaacagtggttcacaggttcattattcgttccttttctcgtttttgttctcggtacttaaaataggctttgtgcatttcatacatgatgccgtccatatcctgcggggtcaactctccgctggcaaatagctcagtaagctcaaatgcgagatgctgggcttctattttgcccttttttccgtaggcttcggcggcacgttcgataaataaagactgatccggctgtaaataggtcagaggtacatggaatatatcggccatcttttcgagcatttcaatactgcgagggtagcggccatcacgctcccatccgatgatcgttcgtttgttgatacccagacattgtgccaattcgtcttgtgttaaagaatgtttctttcgtagatcgcgaactttctctccaaatttcatgtttgcaacctttctatggcgtagttatcgtgctgtaacaatgtgcaacgggatttgtaaatattcaatctggaagatgcaacaaattttcacatttacatcttgacacggcgacacgacttgcttataatatatgctatattctatcatcttttggattattataccgtaaaaaacgtaaatatgcaagtcgaaaaaggtgaaaaaagagcggaagttcaaaaggtgaaattgaatagaagaaaaaagaaacttaaaccaacacaaaggaggccg

SEQ ID NO: 13868 - DNA, 19658 bp, Unknown
  gut microbiota DNA sequence
agtaccattcaaaatcgttctattacaactgctgctttgccagcacgtcagaggtaggggtctggaacaccggaatgtcggcataggggtcggcagcggtgtcggcgggcagactcttcatatactcgtccatggcgacagccaccttcttggcaacagccacagcctctaccacggtgcgtgcgcccatgacggcgtcgccgccggcaaatacgccctcgcgggtggtgcggccgtcctcgctgacactcagcagacccttctggttggtctcgatgccggtcgtggtcttgacgaggttgctctcagaaccctgactgaccgacacgatgacgccggtgtgggggtaaaaagtctcgctgccctctacctgcgtgaacttgccgtcctcacccttgacggtgtcgcggcagatcagaccgttttcccggatctccaccggtgccttgcagaaacggaagcccacgccttccagtttggcatagctcacttcgtactcggaagcgctgatgcagctttcgtcccggcgggcgtagcaggtaacgtggcgggcaccgttgcggatggcggtgcgggcgcagtccatagcggagttgcccacgccgatgacggccacgtcatcgcccagacggaaggccttggagtttgccagatagtcgatgccgaaagccacgttgccaaggctctcgcccttgatgtgcatggcgttggccttccacagaccggcgccgatgaacacgctcttatagccgtcgcggaacaaatcgtcgatggtgatggtcttgccgatggtggtgttggggcgcaccttgatgcccttcagttccagatgacgatactggaaatcgtccagcacactgtccggcaggcggtagttggggatgccgtaacgcatcacgccgccgatcttatcccgggcgtcaaagatggtcacatcgtagccccagcgtgccagcagcaccgcgatggtcaggcctgccgggccggagcccaccacagcggccttcatgccgtttttcggggcagggcctgcggtcatcttgttggcgtaggtggtggagatatagtcctcgatgatggaaaagtgcaccgggtcgtggctgggcatccggttgcggatgcagtgaccctcgcactgcttttcgtggttgcacaccagactgcatacagtggtcagggggttgttttcaaacagcatccggcccgcagcgtccatctggtttgccttgagcagacggatgacctccgggatattggtgtggatggggcagccctcctgacacatcggctttttgcagccgaggcagcggttggcttcgtccagaacatgaagtgccatgggttcctccttgtgtttcccctgcggggacagtcgttttttacaggttcgttgtatccaacattgcattgctttaatcatacacccgaactgcgccggatacaagagggcacaatataaaatttttggcgttattttttgtcaattcgtcaaaaagataattttttgacgatatatcccgcccatcggctccggttttgtccggcacagcgcaccaaggtcgctggctctgctctgggcagcagccatttgggcgcaggtctcgttttcccgtgccagccgcgccagcgagtgggacagcggcagcgccgtctccccgggcagggacagagcctccttgcgtgcgcccagcaggtgcagatagggcggcagcgccggggtctgggcggtgtagcccagcgccgcatccatcgccagccgccgcatccgcgcccgggggtaacgcacggtggtcagggcatccagcaaagcgggcaggcttgcggtctcccgcacggcgttttccagccggtgctccaagccttcggataccccgcgcaccgcggcaaagggggcttgccctgcgcaggctgcccgcagcagtgccagctcgcagtgccccatgaccgcaaaatccgtatactttccgtcatattccgcctgtttatacagtttcagcgccttttccggcacataaggtgccagtgccgccgcgccgccctctgcccagagcgcccgcagggcgctggcgctggcaaaggctgtatggctgctttcggtcagcgcctgcccgtggtctgcgccctgccggggcagggcgatgggctgcatttctacattctgttctatgattgctttacaatactctacggcaagattattgttgggcttgtccagcagtgcggcaacgtctgaccccgggcacagcgcctgcaccgccgcctgccgggcggcggcaaagctgcgtgccccggcggcaagctgctgtttcagcgcggtgcggtatgcttcgctgcacagcacccgggcagctttttgcagtagggcggtgtccgggttctctgccccaaagaccagcgcatcgcacccggcagcagccagaatgcgcacccctgcccgggcaaaagcctcggcaccggcgcaggcgcagggcgcgggcagggcaaacacgaggtctgctccgcaggcaagcgccgcctgcacccgcaccgcctccggcaacagcggcagcgctccccgctgggtaagcccgcagctcatggcaacggccacccgctgcgcccccagcgcccgcgcctgcgccagctgccatgcgtggccgttgtggaaggggtcgtactccgcaatgatgcctgcaaacttcatggaactgctccttttcgccaaaagattgttaaaattatatcggatatacagaaaaatcctgacgtttccgggatttgtgggcaggatatacaaaaaccttgtacacaagttttaccgctttgcccgggttgcgccttgaaaagccgtcacgcctattatataataaacataggaatctgtaaaattctgtccgcaggtttttaggctacggacggtacaaaaattttcaggaggcaacacagatgaaggttctggttattaactgcggttcttcttccctgaagtatcagctgatcgatatggacggcgaaaaggtgctgtgcaaaggcctgtgcgagcgcattggcatggagagcagcatgatcactcacgaggccaacggcaccaaggccaccaccccggcaatcttccccacccacaccgaggcttttgccgaggtcgtgaagaagatgaccaccggtgcaggcaagtgcatcaatgacgtgagcgagatcgacgccatcggtcaccgcgtcgtgcatggcggcgagaagttcaagagcagctgcctgatcaccgatgaggtcatcaacaccctgcgtgagctgagcccgctggctcccctgcacaaccccgctggtattctgggtatcgaggccgcccgcaaggtgttcggcaacattcccatggtggctgtgttcgacaccgccttccacagcaccatgccgccgaaggcttatatgtacgccatcccctacgagtactacgagaagtacggcgtgcgccgctacggcttccacggcaccagccacaagtacgttgcccacaaggcagccgagtatctggaagagcccattgagcgcctgaagctgatcacctgccatctgggcaacggctcctccattgccgcagtcgatcagggcaaggtggtggatacctccatgggcatgaccccgctggccggcctgatgatgggcacccgctgcggcgatctggacccctctgtggtcaactacctgaagtacaccctgaacatcaccggccacgagctggacgagatcctgaacaagaagtccggcctgctgggcatctccggtgtttccagcgataagcgtgacgtggaagaggctgccgcggccggcaacaagcgcgcacagctggcttccgatatgctgaactaccagatcaaaaagaccatcggcagctacattgcagctatgggcggcgtggatgccatcgtctttaccggcggcatcggcgagcacgatgccattgcccgtgcaaagatctgccaccacatggattggctgggcatccgcatcgacaccgagaagaacaagcaccctgttggcgatgtgtgcgagatcaccgcttggggcgcaaaggtgcgcacgctggtcattgctaccgacgaggagctgatgatcgcccgcgacaccaaggaagtcatcgagaagtaagcttttcccaaagggctttgcaggggctgctgcacagaatgtgcagcagcccctttttgcttgtgtgaaaaagtggttcagaaacacccgtaggtgtttctgaaccgcaaatcataaattatctgccgctgcacataacctgtgcagcgcgccgcttttccatcttccagcggtgattttacccaaatatatgctgtcgatttgtgccatgtgtacaaataaaagggcgaacggttgttttttggttgacaaatctcaaaaataacggtacaataggaaagtcctcaatccgagggcgtttatctattcaagcccctggtaagcttactgatcagcgcgatggtcccaaaaccaaaggtatggttacaatccttccgtgggcaagaactaactaaagaggagatactactatgtttgaagacaagactctggtctgcaaggactgcggtaaggaatttgtttggactgccggtgagcaggagttctacgcttctcgcggcttcgagaaccagccccagcgctgcaagccctgccgtgacgcccgcaagaacggcggcgcacgcagcaacagcggcgagcgtcagatgttcgacgctgtctgcgcagcttgcggcaaggcctgcaaggttcccttccagccccgtgaggaccgtccggtctactgctccgactgctttgctcgcatgaagcagaactaagcgctgattttcatttaaatcggtaacaaatccccccgctgccagtcggcagcggggggatttttgcgtttctcttcaggtattcttacgctgatttgcgcccgagagcagcagcaccgcgcggcatagctgcagcttgagcagcaacagctttacctggtcgttccggctctgcatggcgtgcagtggggtgctgcgcaccgccgtgcgcacccggggcttttgcagggtactgcgcagccaagcagtctgctcggaaagggaaagcgggctgcatccaagattcttgattcccatcatcaggtcgcggatcgtgcagtagctcgcctttgcgcggtgcatggggctgtcctgtaagccccacgcggcaacggtgtcccacactgcatcgctgagataaaagttatcctccagacgctccgggtggtagctgttggacaggctgccccgccgggcagcggtgtagtggtacagcggcttttccagcaccaccagacagccgggattttgacgataaaaggctacaaagaacagcccgtcctcccccagctgatggcagggaaagcgcagatggtgctgttccagaaacgcccggcggaacagcttattggtgaccagatacgaggacgccgtgtcgtcgaaatgttccttgaagggcgcgccccggtacacgccggagagggtgctgccgctggtctgcgtgtgcagcagccggtcattttcatcatagctgtccagatacagcccaaactccacgcagtccgcatcagcattccgggcggcatgatacagcacttctgccgcatccggctctacccagtcatccggatccagaaagaagatatactcgccccgggctgcatccagacccgcgttgcgggcagtggctacgccgccgttgggctggtcgatgaagcgaaagcgcgcatcctcggcagcagcctgtgcacacagcgcggcgctgccgtccttggagccatcgttgatgagaatggcctcgaagtcggtcaaagtctgcgcccgcagtgagcgcagcgcccggggcagcaggcgctccatattataaacaggcactataaacgagatacagggcattgttttcactccttgccgtcacacttccttcatcagaatatggatgcggtcccgcatctcttgtcgactatccggcatccacatcttgggcttcgggggctttttgcgctccattgtataggcaagcgtcaccagtcgaagcgccattgtgctccagaaataaaaggcggtattatcggtcaggtaggtcaccgtcatatagcctagctcggacagatacagcaacgtggtctcttggtctgcatagcgctgccagaacagcggagtcagaacatactggatgctggaccagagcagaaaacccggaaagcctacctctacaaagaccttcaggatgtcgttgtggaaggggtaaggctggttgatgagcccgtcattataccactgggcgatgatggtgtccacatattcaaaaccgcggccgatataggtgatagaaaattcatagtaggggttcgccatgctccacagatagtcccgacccatcatgtcaatgccaaaactgttcagcaaccttgaaataacaccgtagcgcacacagtagaggaatgccagaaaaaacaggatgcagcagacgcccactgccgggtaaaaccagccggggactttgcgcttgcggagaagcagagcgatcaggacgaacagaaccaccgccgggatggcgatgcgcttcatgccgaccagaaaaaaccagcagcagagcagcagatacagccagcgcttgcgcttttcctgccgggtagtacgaggagcaaaaacggcgtagtacaagatcatctgcccgaacacaaaggtcaggtcgtgaatctccagctgcagcgcatagccatccgcatcaccgaaggtgatcagacaggtaacgagagactggatgctggctgcaaaaccgtagccaggaatgctcagcagcatgatggccgtgttggcaatgcagatgctgatggtaaacagctcgatggctttttcccggaacagatagaccagcgccacggcagtgaggatggcaatactctggaacacgatcttggagcagcttcggatcatggaagacactgcggcaaagctttcgatccagatgaccatcgaccagaaaaacagcgccgccatcagggacatataaagcagggtaggcttccataactcccggagacgcttttcgtccgggtaaaacagggtgtacagcattgccagcccgatcacccccagagagatggctttgggaaggccgcccactgcgctgttgattggtttccactctcccagcccggcaccggccaaaaagaccacgcaaccgatggtcagcagtttttgccacagcgggctgtccttataaaacaaagaggccggagttttccggctgtaatcctttttggtcaggatctgatccaatgtgcgcatgaaaagggctctccttttattgtgggtgttcccgcagccgccggggggttacgcctgccctcccagttgcaggtactgctgctgcaagcgggcggcggcgatgttgatatcgtagccagcctgtcggatcagttctgcaccagcagagcggtcgcagggctggtggagcatccgctgcaagcctgctgcccagtctgcattgctggcggaaagcgggatctggatggcatgggaagaaagcagcacctccgccggcactgcgtccgaaaatacgcaccccagcccggcggcttgcgcctcgatccccaccaccggcagaccctcgaagcgggagggcatgacgaagagatccatcatctggtaccagtcggccacattgctttgcaacccggcaaacaggatatgatctgtgatacccagttcctgcgcctgtgcgcggacagcctgctccagcctgccggtaccaatgagcaccagcatcgcccggggctccagctgcaaaaaggcggcaaagatctccaatagacgctcgtggttcttgcggacatcaaagcggcctacatgacccagcaccacccggtcctccagcacgtagcgcgcccgcatttcggcgcggacggcgggggagaagcggaaggtctccggctcgatggcgttgggaatgatctgtccccggcgctcccagtccgctttgccaaagtagtagatgcccgcatcccggccgcaggcccacaggtgggtggcggcgccgggcagcagctgcttacagaacatcttcagcggccacttgtagtcccggacgatccagatattatgggcgtgggcaatgcgcacttgcagcccggccttctccgcacccttcagggcataaagccccatcgcctcgttgtgggcgtgcaggatgcggatgcgggggtctgtggccacggtctgctgcacaaagcgcagatacgccgggtagtgcagcgggtttaatcccggactctggtagatatgcccgcccagacggcggatctcgtcgtcgtaatcgccgggcttttgcttgttgacgataaaatcaaactggaccttttcgcggtcgatatgccggtagtagttcatcagcatggtttcgatcccgccgcggtccatattgctgaccgaatgcagcactcgtatcatgggtactccttatattataacaactgaaatcttctgccgtagcggcaccacagcccaaagtcctgctgccgcagcgcccgggcaccccagcgggcacggcggggcagtgcgccctcttgcggcagcgcctttgcgtacaaagcacagcacagccggaaaacagcctgctgcgtttccggcggcaggccggatacagtggcatagcagaaagccgaaagctgcaacgtcaggctgcagcggtacagcgcatcgtggggcaagcccagcgcagcatcctgcactgccagctgctccatgatccagtagctctgcacggcggcaggacggtgctggcttgtggcggtaagccccttggggtttttgcgccacagatagaccacctcgggcacagaggccacgctctttgccagccggaataccagaaaatggatgatggcatcctcaaagcaggtatagtaagccggaaagcgcacctgtgcaaacagttcccgccggtacaccttgccccatggcatcccgggcagctcgaaccgctccggcgcggcggcaccggtgtagactgccgccgggtagcgctgcaccgggccgtgggtgccgtcggtgtacaggtattgccagccaccctgcaccacatcggcgtcaaggcgctgtgcggcctccagcagggtgcggatggcaccgggcaataacagatcgtcgctgtccacgaacatcagccagcggcccacggcgtggcgcagtccctcgttgcgggcggcggcggcgctgcggggcgcactgcaattgcacagcaacaccccgggcagtgcccggtagcgttccagcacggcggctgtgccgtcggtggaatcgctgtccaccacgatcagctgcacggtgcagccggtgtcctgctgcaaaatgctgtccagacaggggccgatggtagcttcgccattgtacaccggcacaatgaccgaaagggtcaccgccgggtcctgctgcggcagcagcgggcaggtctcttctgctgcaggtttcgggcacagggctgccagcgcggcgcggtcggcctgtgtgctgtccggcagcggggcaccgccccggtgcagcagatggtacagcccaaggtctgcatggccgcaggctgcgccgcacacggcggcagcgcccgccagcagacggctgcgggtgtggcagtggatcagctggtaagcgcgtcggttctggatcatgcttcaccacgctccattccggcaaggacagcgccgccctcctctgcgatcagggacatctttttctgtgcgcagcgcacaaggtcgcgcacatggtagagctcctcctccgaggtggtggcccatgcggcggtgaacaggatggggtactccgggttgagcttattgtactcgttcacctgactttgcaggatgcggatcatgacctctgccttccgggtgctgcattcatcaaagaaggcaaggaacttgcccgcgccgttgtagcccaccgtgccgtcggtatcgcccatcagctgcaaaagaccggaaaaatccttcaggatgccgtcacccacatggtagccgaagcggcggctcatctcggtcaggttgtccagctgcaaagcaaagcaggtatagtcctccggcagaatgcggtcggccatgccggagatatacacgttgagcttttcgcggttgggcataccggtctttttgtccacatacagcagataatccaccgcatccgagatgcggcccagcagaattgcgccgcagcagccgatgacaaagaacagcaccagcgcaagcatcaggtacagcttgacattgatggcggcagccacctgcaccgagctgatcatcttcagataatccgcgctgatgtacaggttcagctccttgctgctggtattgatgatctcgtagtagcttttcagctgcgcctcgtagtcgttgatcatgctttccatcttggcgtgctgctcgcctgtaccgccaaaatccacgttgcggaagctttgcaggatctcctcctgaaactgccggtcgatctggctggatgcgacctgctgttccagcgataccagtttcagcaccagaccgtcgtaggtggtctgtgccttatcgccagcaccttccagctcgatgttattcaggatatagtccgaggacaccacctcgccccggtcagtaaagtagttttgcagcagatcggcgttcttgtacacatactggtcggtcaggctccacagactgtcccgctgctcggtggtgatctgttcgttctgctttgcagtttcgatggtgttggccagatattcctgcagcaccgtgccgtcccgcacctgcgggccgttgagcacataggcgtacagcgccgggatggtgtattttttgaagtcggaatagatatcgcacaggtctgcataggtgtagccggtgcgggaggagcgaaaattcgggtagtgctcccgcttgctcagcagatagtcctgcatctcgttggtatcgttttccagaatgcggatgcactcgtagtaatcgtagccattgtccagcagaccggacgaggggttgagcgagagtttctgctccacatatttttccgtataataggtgcagtagctctggatgatggcatccagcatattgcgggcataacccgcgccctgctctccatccaccacaaggctcaccttgtaggtatccgggaaataggtcacctcttcgcccttttgcagcagggcctcgttgatggtctcctgatcttccgagatcaccggggtcaccgagatgttggaacggatggtgctcagccgcccggaagcacccagtgcatccatggcctgcgagatgacggtggaggagtaaatctcgttgacgtccagctcgctgccgtccggggtgtagccgtcagagatgccgtcgttggtatagcggataatgaccgatgcagtgtacttctgccgaccgtctgcatacaggtagatggcggccgcacctgccagcgacaccagaaagatcagcaggctgaaacgcttcagatagcgcaggatctcaaactttttcatctgcggtgccttgcctttctgcgtttacgttcgtggagcagccatgcgccgcccagcatcacggcaacggactccatcagggtctttttcaggctcaggcgctgcaggaaggaggccgagccgtaggtaaaggtgatatagttctgggatttgtacttgatatacgccttgtccagtacaaacagctgctccgagatctcgttgatggcggcctccagcttgttcaccatggcctgcgcctcggccagacgcggctggccggcatccagctcccggatcttctggatcacataattcgtgctcacgatctcggactggtagtcggtggcatcggccagagaagcgtctgccgcccgcgccagcgcatccatggcggtcttggtgcgggacatatagtactcgcttgcttcatccacggtggggatcatcatgatggaggtcatggatttttcgtagatggaaatgccctttttgtcggcgtcatagtaagcctgctgggtgcgcatgtcaatatcgtcgatcttgttcttgtattccagaatgctggtcagcatggccgggtcgcgggcaacgccgccctcaatgacaaaggccatggcgttgggcaggtcgtaatccaccagattgttgatcattttgcccagtgtggtaaagttgttggtggaagggtcgggatttgcctcgtccgtaaagctcttgttctcccccagacgggcgttcagatagcggttcagcgcggcggcgcgcacctccagctcgttcagtcgcaggtaaggctcgcacgcggtggtcacttccagcttttccttgaggatgctctggttatcgcagtagttgctcagaaagatctcccggtaggattcgcacacgctctgcaaaagatctgtgggcttgcggttgcccaggttcagcttgcgggtgttgatggagagatagtagttggtgctgatatactcgctgccgttggcgctgccggtgccgtccggactcaggtaaaggcactctgccagctgggaggcagtcaggctgtcctgcaggcccacccgccggatggcgcgctccatcacctcgtccgaaacaatctcgtaggcgttgaagcgggtcttgttggggttcatgcccagcgaagcctcggagtaattgaaggagatgctggcagtggcgctgtccgcacttttgaaatagtgaaccagcccgaacagacagcacaaggtcagcaggcagagaaacaggcggtatttatttgtccagatatgacgcagcgcctgtttgattttttctttgatgtcatccatggcattctacccttttgcagcggtctgcacgcgcagcgcaggctgcttagtcgatgtcaatgaccgaaagctccggcacattgttgatgcggggcgcccggctggaatcgcccagtccccggcttacaatgagggtggcgttgttggcaagcgtatagctgcctccggcatagtcgggcagaaagccctcctcggcggtataaagcggaccgatcttcggcagacgcacgatgccgccgtgggtgtgcccggcaagacccagctcaaaggaataattttccagatgctcgggaaagtaggtgggcacatgcgccagacagatgcgcagatcgtagtctgtctgcggctccacgctgtccataaaggtgctggcaccgtagttggaaaaatccgccgggctgccctccacgcccagaatgctgataacgttgtcgtggacggtatagcgcgcctcttcattgcgcaggacggtcaccccggcagcggtgaacttttccaccagttcccggtcgttgtccagaaaatacagctcgtcctcgtggttgcccagcactccgcataccggggcaatctcgctcagctgacggaacagggaaagcatattatcatagtcggtgccttcgccgtaggtcacaaagtcgccgcccagcaggatcagatccggggcaaggctgcggacatcctgcaccagctcacagttatctgctccgtattcccgcagatgcagatcggtcagaaaaacgacccggcagctctgggtcagcttgcgggaatgaatctgatagaactctgccgtatagtgggtgcggttatagcagatattctgccacagcgccccgcccagcagggcgagcagggcaacaagaaccagcagcgtcagcagcacctgcttccagaggggcgttgccctctgtgcgccgccactgtgtgtatgtctgctgttttgcgctgcgccttttccgtgttttgctttgataaaggccacatcctttctgccggggaacgttgcatagagaagggcgcagcacaaggccgcagcccatctctccaaaaacggatacaaaaactgatatataaataaattataacatatttagtaggaaaagcaaagagtgcgtctctgccatgggcggatttcacatttgggagttcccatcaaaaaagggatgccgcgcacgcagcatcccttttgcatatttgcagatcaatcgtcatcgctatccagcttgagcacggcggtaaaggcttcgctgggcagggaaacgctgcccagctgacgcatcttctttttgccttccttctgcttttccagcagcttctttttacgggagatatcgccgccgtagcacttggccagcacatccttgcgcatggccttgaccgtctcgcgggcaatgatcttgccgccgatggctgcctgcaccgggatctcaaacaggttgcgcgggatgttgtcccgcagcttttcgcagatgcggcgtcccttggcgtaggcgttgtcccggaacacgatcatggacaaggcgtccacggggtcgccgttgagcaggaaatccagcttgaccagatcgctctcgcggtactccttgaactcgtagtcgtagctggcgtagccccggctgcggctcttgatggcatcaaagaagtcgtacacgatctcgcccagcggcaaagcatagtgcaggtccacgcgcacatcgtccagatacttcatatcgatcaggacgccgcgcttgctctggcaaagatccatcaggccgcccacatagtcgttgggggtgtacagatgcacatccacaaagggctcttcctgtttgacgatattgctggggtccgggtagctggaggggttgtcgatcatttccactgtgccgtcggtcaaagtcaggcggtagcgcacgctgggggtggtggtgatgatgtccagatcgaactcccgctccaatcgctcggtgatgatctccatgtgcagcagacccaggaagccgcagcggaagccgaagcccagcgcggcgctggtctccagctcaaaggtcagggaggcgtcgttcagctgcaatttttccagcgcgtccttcaggtcggggtacttggcaccgtcggcggggtagatgccgcagaacaccatgggcttgacctgacggtagccgggcagtgcctctgcggtggggcgctctgccagcgtgacagtatcgcctacgcgggtgtcctgcaccgtcttgatgctggcggtcaggtagcctacctcaccggcctgcagctgggcgcagggggtcagggaggtggcacccatgtgacccacctccaccagcgtgaactctgcgccggtggccatcatacggatggtgtcgccgggcttcaccgagccctcgaacacgcggatgtagacgatgacgcccttgtagctgtcatagatgctgtcgaagatcagcgcctttaagggggcgtccgggtcaccggtgggggcggggatatcgctgaccacacgctccagcacctgatcgacgttcaggccagtcttggcggagacgcggggcgcgtccatgcagggcaggccgatcacgtcctccacctcctgcgccacctcgtccgggtgggcgctgggcaggtcgatcttgttcaggatgggcaccagttccagatcgtgctccagtgccatataggtgtttgccagcgtctgcgcctccacgccctgcgtggcgtccaccaccagaatggcgccctcgcaggcggccagactgcggctgacctcgtaggcaaagtccacgtgacccggggtgtcgatcaggttgaactcgtaggtcttgccgtcctttgcagtatagttcatggtcacggcacgcgccttgatggtaatgccgcgctcgcgctcgatatccatgttgtccaagatctggtcttccatggtgcgctcgtccacgctcttggtcagttccagaatgcggtcggacagggtggatttgccgtggtcgatatgtgcaatgatgcagaagttgcggatgttgtctcttgccatgtagttcctccgggcagctttatgcttctaagatccagtcctccacagccacgatctgtccgtggtcgcggtagacgcggggcacgcggcgggaaacgccgcacagcacttcgtaggggatggtatcggtcttgcgggcaatggtctctgcggtgtcgctcacggtgccgccccacaggatggcttcatcgtcctcgcgcacttccggcacatcggtcacgtccaccatcatctgatccatgcacacccgccccagtaccgggcaggccttgccgtggatctccaccacgcccttgccgcagctcaaaagccgggggtagccatcggcatagccggtgcaaagggtggctaccttggtgggcttttcagcggtaaagcggcggccgtagctggcgcactggccgggctgcatctctttgatcatgctcaccacggtcttgagggtcattaccggcttaaaacgcccaaagcgcacctcgtcgctggggtcgtagccgtacaggatgatgccggggcgcgccatgcagcgctcccggggtagtccctccggccagtccgggtgcagcatgaccccggcagagttgtcacagtgcacaagggcaggctcccgcccggcggccttcagtgcgtggaaggctttcacgaacagtgcgtgctgctcggcagtataggccacattctccggggcggtatcatcggccacggaaaaatgctggaacaggccggtcatttccagcccgggcagcgcacaggcctccagcatctcccggatggcggcgtcaaaatcggtgcgcagggcaaagccgatgcgccccatgccggtgtcggccttgaggtggatgtgtactttgccccctgccgccacggcggcttcgctcagggcgcgtgcctgcgcaagggagtagcaggccacagtgatgtcgttctgaatcagggcggcggcgtaggcgggctgcacatgccccagaatgaggatgggcaaagtctgccccgccttgcgcagctgcacagcctcggtcaggcagctgaccgccagccatgcggcgccctcctcggcgaacacccgggcgcactgtaccgcgccgtggccgtagctgtcggccttgaccactgcgcacaggggcagcgcccctgcccgggcctttacctcccggaaattataccgaagggcctcgaggtcgatctcggcccagacgtgtttttcaaacggttgtttctgcatgatctgtttccttttttggtacgatgaagctgccccggcccgtgtggacgggacgccagccgtcaatgccgctctcctgcaaagcatggagggtcttttggcggaaggcgtggtcggtgcggcagcgctcctgcacaaattccttggtctgttcccgcacggtaacgccgtctgcggggcagcggctcttcacgatgggcaagcccgcctcccgcacggcgcactgcacctcgtactcggtggcaagcagcatgggacggatgagggtgagatcccgctgggagaggtaggtcaccggcgagaagcagccgatgcgtccctcccgccagaggttcatataaaaggtctccacggcatcgtccagatgatgccccagcgccaccttgttgcagcccagctcctgcgcggcggtgtgcagcgcaccccgccgcagcttggcacacagggcgcaggggttcttctccttgcggtactcgaacaccacagggccgatctcggtgcggcgcacctcgtaggggatgccgtgctgccggaacagctctgccagcgccgagtagtccatgggctgatggtcgaactgcgggtccagcgtgaccgccaccacctcgtaatcgaagccgatatacttgcgcagcatggaaagaccgatggtcagcgccacgctgtccttgccgccggaaacgcccaccatcacccggtcgccgggagcgatcatttcatagtcctgtacggccttgcgcattaaaccgcagagccgctgcattgcacgaagattactcatgacaggctcacgctttctaccagattgaccacatcgttgatggacgccagctttgtcagcgccgagacatagaccacatcgccgctgtcgtaggtgatggtggccagcacggcgtagtaggtgcggatatcacagcgcaccgcctctaccgctgcaccctccacggtcaggttgaccttgcggggcttgatgacgccgtaggcctgcttgaggtcggcttccgagtcctcgataaagctttcgtagctgtcggcggtgccccgctgcaacagcacggcctgatagtcctcgctgtctgccgtgtcggcggtagccagctccagcacggtgccaagggttgcgtcctcggtcatgcggcacacgctccacacgctgctgtcgtagtagacagagatgccattcgtgccggtatagtgggtgtcgggtgtcgcgggggtctgccggttcaccagcagggtgagcaccatgtaggctgcgatgcccagacagatgaaaatggccatcgccgtcagcagctttgagctgcggcgctgcgccgaagaagtgcggtcgatctcatttggcatggatgtgttctccttgtgttggcaagggcggcggtgcaccgcccatatcctttatagtataccacaaccgcagcgggatttgtagcgggcaaatggcaaaaatatgccggggcgggcaaaaaacttttacaaaaatcggaattcaggaatcgagaggatttgagagaaaacaagcgattttgagagtttcaaaaatttccaccgaaaaaatccaaaaatcatgttgacaggcgcgtttttgtgttgtatactgacacttgcgccccaaaagggcgcctgaaacgtacaaaaagcttatcaggaggaaatagatatgagcactactctcgtaaagcccgctgaagtcgagcgtaagtggtacctgctcgacgctaccggcaagagcctgggccacgtcgctgctgaggccgctgttctgctgcgcggcaagcagaaggtcgattacacccccaacgtggactgcggcgatttcgtggttgtcatcaactgcgacaaggctgttctgaccggcaagaaggccgagcagaagttccacatcacccacagcaagtacatcggcggcctgaagaaggtccagtacagcaagctgatggctgagaacagcgatctggctatgacctacgctatcaagggcatgatcccttccaacaccatcggtgataaggctctgacccgcctgcactgctaccagggtgccgagcacgctcacgctgctcagaagcccgagaagatcgagttctaagaaggaggcaatcgaatatgtacgaaaccaaaccttatttctacggcactggtcgtcgtaaggattccgttgcccgcgttcgcgtttacaccggcaccggtaagatcaccatcaacgatcgtgatatcgacaactacttcggtctggagaccctgaagctgatcgtccgttctccgctggtcctgctgggcctggagggcaagtatgacgtcgtcgtccgcgtttccggcggcggtgtttccggtcaggctggcgctatccgtcacggcctgagccgcgccctgctgcagcagagcgacgagaaccgtcctgtgctgaagaaggctggcttcctgacccgcgatcctcgtatgaaggagcgtaagaagtacggtctgaaggctgcacgtcgtgctccccagttctccaagcgctgattatatttcagacgcaactttacggctctgcttcggcagagccgttttttgttgcccctttcccggagaactggggagcacgactgcgcatctccgg

SEQ ID NO: 13869 - DNA, 42282 bp, Unknown
  gut microbiota DNA sequence
gacttgaacctccaccgagttgccccgattagaacctgaatctaacgcgtctgccaattccgccatatccgcatattctgttgtgttcctgcgccgttgcgccgggaacgatagttattataccagatacaaaggaaatgtcaaggcttaatttcaaaattattcgacaaatttttgcagcaaagttggtgcactctggatagcggctgcggggcgctttttagggcagattatggtacaataaacgatagacagtaccgcacaattcccgcctgacggcttaagcaccgttccggcggctgcggcacggcatctgcgttgccaaaatgctcgataatacacaaagtattatctgcgcttttggcttagcatctgccgcacctcgcgcgccgtatcggcacttagaattatgcggtactgtctatacgtccgggcaccgcccggcgattacggaaaaacgagggaaaacaatgctgaatgtgattatttttctggtgggcgcgctgatcatgttttacatggcgctgcgcagtgtgcgggcgcggcagcagctgcgcaccaagggcgtctgcgtacaggccacggtaagcggcacggtgcagagccgggacggcgctgcctatgtgctggagtttaccaccgcaggcggcagccaccggctgcaatatcccaagcccgccaagggcaagccctttgccgagggcagcgtggtcaccctgtactacgacccggatgccccggagaagatgttcgtagagggcgacaagtccgtgctgggtgctgagctgctgtacgctggcatcggcgtggcgctgctggtgctgatggtcggcatcatgaaccgctgagaaggagggacaccgcatgaaactggaacatttcggcatggctgagccgggggactgccggttggtattcacggcaagcgcggaggagctgaccgctgcgctggcaaaggagcaggccgccccggacgccccgcaggacgaggaagaactgctgacggcagcggtaaaccgcaccattctggagggctttgaccctctttaccgacagctggtgcaggagcagaagcttgtaccggtgaccgacccagattttgagctgctggcggtcaacaaggccgagggcttccgggcgggagcacagttctacaccctgccaccgctggagctgggacaggacaccggctttgtgcagcctatcgagccccacccgctgcgccggttgaccattgaactggagatcaaccgcaactacggcgatgaagaacgcgccgccgatgccgcaggcaaggccgcgctgcgcgaccgggtgacccgggagctctacgcaaagcgctgcgcacaggccaaggaccgggctgaaaaggagctggtctggcagctgggcgatgaggtgaccggcccggtgccaaaacggctggaagcgggcaactactttgccgagcagcggcagttcaatctgagcttgcaggcaaacggtatcaactttgaccagttcttagccgtgcgcgggcagacggtagaacagtttcggcagtggctgcaccggcaggcagagcgcaagctgcgcagctggctggggcttttgctggtggctgagcgggagggcttacagcccaccgaagccgaggtgaacgctgctcttgcgcactggaacgagaagctggacggagagcgcaccttccccgcgaacgatgcccgcaaagtgcgccagcgccttgcccgggcaaaggctgcggcctttgtggtggcgcattccacccttaccccaccgccgtccgaaccccttgtgcaggaatcggaagcaaaataaaaatgatggttctcatgccatggcgagcagtctgcgggctgcccgccgtggcattttttgcaaaaaagggacagcggcgcacccgtaggtacttccgctgtcccgaatgttattcttttattccagatgatgcttccggcagaaccttttgctcacccagtacatcccgccccacagcaggacggcaagcacaaggtagaccgggtttttcagggagctgaccagtgactgcccaaagacagccatcatggccaccatcagccccttgcccaaaaggacagcgcgcaggtagcgcttttcgtcaaagtccgacatcccgaaggcaaagtgcatgaaggaggtgggggtgaagggcagcagcgacagcatgaacagggacgaggtatcgaagcggttcacccactgctgtgccttttccagcttgggggagcggctggctaccttccagaaaaagcgcttgatgagccgccgccagaataaaaacatgatgatgccgcccagcgccacgcctgcccagctgtacaaaaagcccagcagaccgccgtgtgcggctacgttcagtgctacaatggcgatcagcggcagcggcggaaaaaaggactctaccatcgccagcaaaatgggcacaagggggccaagcccctcaaagcccgccagcagcgcctcccagtattccagtgttccaagctggtgcacccagcccatcagtgcggtttgcatcctgtgtccaatccctttctgtgcagcggtgccgggacgttcccgggcaggctgcatcatgcttagtatatccattctctatgacagagccatgaacagagtgtgcatttttcgacacgcttcaggctctgctaccaatactacgagatgaaaagggattttcctgcctttatttttccgcagcctgcttttcagccttggcgcgcatccgctccagctgggcggtgcgcagtttttcccagcgggcaaggctttcggcgtccggcatctgggcgcagcgggcaaagctccagtgcaggccgtcccggcgggacagcttgtaccgctggaacacgccctgcccggcggcgttgctgctgccggtgcagctggggcactgacacagggtataccagctgttgctgccctttttcagccaaatctcgtccggctgcagggtggtgccgcactccgggcagggcatctggctgatcttggggtcagcccgccatgcgtactgctccacatagccgtggaacaccgtaaagtcccggtagtcaccgggggtctggcacaggctctggcgcagcgcctcgtcctcggtggggtaggcggcaagaccggcgcgcagatccagcagacggcagacatcggcggtgtacagcgtgtccgaaagtgcatcgtggaaggggcgttccatggggacgcccatgcgggtgaccacgctttccagcgtcatgccctcgccctccttgcggggatgctcccgcagaaagacctgctgcaggtcataccagacggtgggcctggactcgtccagattgcacaggaacaaattctgcttgagcaccggcacgtcatccagaccccactcggcaaactcggcatccgggccgcaccactgcataaagcggcgcagtccctgcacgatgggctcgcccctgtccagatcggcctgcgtcaggccggtcaccttggcgatatggtgctgcaatttgcggaagatgcggggacgcagatggatggaaaaggtgtccagcacattggcatcctcgtcgatctttacggcgccgatctccacgatctcgccccgcagggtctgctgcaccccatggtagttaaaggtatacggctggtagccgatgttccattccagatcaaataaaaccaagttacgcggcattgctttgttagtcctctcgtaaaataaacttctccacggcctcggccacgccgtcgtggttgttgtcggcggtggtcacatagtcggcgcagtcctttaccggctgctcggcgttctgcatggccacgcccaccccggcgtaggcgatcatggagcggtcgttcaggccgtcgccgcaggccatcaggttctcgcgggtcaaccccatgcggcgcagaagttccgccagactgccgtccttggctacgcccagcggcaccgcctcgataaagaaggggctggaggggtacaggtcggcgcggcctgcaaactgctgctgcccggcggcgcacaccgcgtcccggcgggcgggatccagcgtgatgagcatcttgcacacggggtagttcacataggacgccagatcgtccacatggatcatggggagctttgtggtaaagcactccttgttcgcccactcgtccttgtcccgctcgcagacgatgccctcgcggttataggtcaggatggcaatatcctgcgcggcggcaaaagcgcacagctcgggcacaagggcagggtccagcgttttttccaccagcgtttcgccggtgcggcagtccacgatcttgccgccgttgtaggacaggatgcagccgccctttttgtccagacccagctcctcagccagcggctggatgccggcggtaggccggccagatgccagcacgatggtcacgcccttttcaatggcggcgtccagcgcggtgcgggtgcgcggggtgacgagcttctggtcgtcggtcagggtgccatccagatccagcgccagcactttgatatcagacatatttaaaagatcctctcgttatagaagtatatcttagcacggtctacctctattgtacaatgaaaagccccctgcttgcaacccttgcggggcggttcggtgcaaaaagtgacccggcggcgggcgttacaggcagattttacctgctttgcccggattttacaccgccgttcttccgtgcgccaaaggtttacctaagtgttacacggggctggtttcgccgctgcaggcggtgcgctacaatacaggtgttcccacaagaaatagtagaaccgccccaagccgggctgaaaaagagaggatatctgttatgaagaacgcgaaaatttcccgccgcagcttcctgaaagccggtgccgttgcatcggcagtgggtatgctgtcggctgcacccgtagctgcgcacgccgccgagacggatgcttctgccgcagcagacgaagagaacggtttgctggacgtgttcaaaaagcccaagtacgttttcctgttcattggcgacggcatgggcgctgcccagatccagtctgcacgcttctacaagggcaccgtggacaacaacggcgctgtgaccgaggctgacctgagctttaccagcttcccgcaggtgggcagcgtgaccacctacgacagcacctccttctgcccggattccgcttccaccgccacctccatcgccaccggccacaagaccgagagcggcgtcatcaatatgtgcccctggacccgcgatgtgccctacgagaccatcgctgaaaagctgcacgcccagaaaggctataaggttggcgtgatctccaccgtgaacatcgaccacgccacccccgctgccttctatgcccaccagaagacccgcaagaactactacgagatcggcgtggaactggcaaactccggctttgagtactttgccggcggcgagttccagaaggtgaacggcgacggtaccggccccgacaaccataccgtggctgccaacgcaggttacaacgtggtcactacccaggccagtgcagcggctctgaccgccggtgcaggcaagactctgatcattgccgagaatctgggcgatggcaaggccatgaactacgccatggacgctgccaacggcgagtggcagctgaccgactatgtcaagaagggcatcgagctgctgaacaacaagaagggcttcttcctgatgactgagtccggcaagatcgactgggcctgccacgccaacgacgccgctgcttccatccacgatgtgctggagatgagcaacgccgtgcaggctgcggtggacttctacaacgcccaccccaacgagaccctgatccttgtcaccgccgaccacgagaccggcggcatggccatcggctacaagaccaccaactacgacaccttcctgaccaatctggcacaccagaagatgtcctacgcaaagttcgattccacctatgtgcagggctacattgccaacaagaccccctttgagactgccatgcaggatgtgaagaatgtctttggcctgactctgcccaccgaccccgctgccgccagcgcaggcaagctgctgctgactgactacgaggtggagaacctgcgcaaggcctacgagcgcaccctgcaggtgggctcctccagccagagcaagatgagccagcaggactacgagctgtacggtacctacatccccttcagcatggctgtctgccacaccatcaaccacaagtccggcatggaccacaccacctacgcccacaccggtgccatggtcaacgtgtacgccatgggtgtcggcgccgagaagttcggcggcgtgtacgacaataccgagatctaccacaagctggctgagctgaccaaggtgcagtaagagcgcctgattttcccacctcacttcccactccacttttccacaaccaaactgcaaaatgtgcaaaacccttcctgccgaaagcgcaaagactgcgcccggccgggagggttttgttgtattatcaatgctgaatgcttcaggccttcatttcgggaaagccctccagcttggaggtgcagtgagggcagcgcacagccttgatggagatctcgctctggcagtaggggcacaccttggtggtgggctcctccggtgcggcaggctcctcgggctttttgtgcagggagttgacaaacttgatcacaacaaacagtacaaaggccacgatgaggaagttgatgatggagttgacgaactcgccgatcttgatgctggagccgcccagaccaatgaccacatcggaaaaatctgccttgaagaacaggccgatcagcgggttgatgatgtcctccaccagcgcggtgacgatggcggtgaaggcaccgccgatgacaacgcccactgccatgtccagcacattaccgcgcatggcaaatgccttgaactcttcaaggaactttttgatgccgctttttttctcctccatagataaaccgctccttcttgtccccttttttaccgcaagggggttcttttatttttataatagcgtatggcgcgtcgatttgcaagagtaaagcagcccattttatagaaaataaaaagtagcttctcccgcgaaaaaacgatcccggaaaatccgcagactttccgggatcgtcctattcaaaaatagtttttccgctgatttatgctgcgggctgctctgccgcttgttcggcggactgctctgcggcgggctgggggtcagcggtcaccgtaatggtgcggctgatgctgccgcaggagtagttgccccctgccttggcggtctgggtgtaggtgccgggctcggtgggcacgccgtttattttgctgctgaagcacaggaaggtctttttcttgtaggtgtaattcaccttgccgttttcagccacctgtccgtccgaaatgaccttggcggtcagatcggcgttttgcagctgggagacggtcatgctggacggagcatcggctgcccagctcaggctgacgttttcggtcttgggcttgatcttgaacatggcaaacccggcggcgttgatatcgctgctttccagcgcaatagcaccggcaacgtacttgccgctgtccttgggctgctcatccagatagatgcggctcagcgcgccctcgggcagatacttgcggatcaggctcagggtcagcttcatgccgttggaaacattcttcacagtggtcaggtagctggcggggacaaagaagctgacggtgtccatcaccgacactacttcgtccgccacccgcagcagcacgccgacatcgttgccgtcgatcagctgcttgaggtagctgtatacattgaattcctcggcctggtccggggtctgggacatctttttgggcagagggatcagcttgagcagggtgcgcagcttatccgagatcatcagggtcacatagccgtaggcttcgccgctggtgcccagcaccacggcaatatactgggtgttttcgggccgggtctccacctccagcttataatcggagccgtagacaaggttgccggtcgcccggatgcggatgttgacgatatcattttcatcctctgccgcgctcagcgctgcggcatcggacaattcctcgctgacaacagcggtgctttccggctgctgagctgccgccgaggcgggcattgccagcacaccaagcatcatgctgaccgcaagcagcagcgagatccatcgtttggccttcatacgaaaacctcctttgttgtttggtatcatacccacattttaccgcaaaataatcctagggtcaataacgggattcaagccgggcgcatcactccccgatataggtaaagcggggctgggtaacgccgtcccgggtcacagtttccagccacatggcggcggggcgcacccacagcccaccctcgccgtacagggcgcggtacaccaccatctcctcctcggtctcgctgtggcgtgctacgcccagcacctgatactcgttgcctttaaagtggcggtagcgcccggggcgcaccggatattgcagttccttcatagccgttcctttcttttctgcaaaaagggctgctgcgccgggcgggtgcagcagcccacaaaccttattatattacagcgtgctgtccgttccatcgccgggggtctgctcggcagagtacagcagcatcaggtgattggccgaggcttccagctggctcttggcctgccgcagggcagcttcctcggtctcgttcatcttttcgggtttatccttgcgcaggcagcggcgcaggttggcaaggtcggccttcacgcgggatttttcgtccttatccagttcctttttgcacttggaaagcgcttcatccaccttataagccagcacctcggcctgattgtgcagctccaggcgctccttgcggcggctgtcctcggcctcgtaggcggcggcgtctgccatggcgcgctggatctcgttttcggaaaggttggtgctgccggtgatggtgatgttctgctcccgcccggtggcgaggtctttcgcagataccttcaccacgccgttcacatcgatatcaaaggtgacctcgatctggggcttagacgaaaagcttgcccggatgccgttcagcttgaatttgcccaaagacttgttgtcccgcgcaaagtggcgctcaccctgcaaaacgttgatctccacgctggtctgcatgggacgggcggtggtaaagatctggctcttgcgggtggggatcatgctgttgcgagtgatcagcggggtggccacgccgcccagcgtctcgatggacaaggtcagcggggtcacgtccatcagcaccagcccctgcgctgccgcgccggtggcacccgccagcttgccgccgccctgcagcagtgcgccctgcaccgctgcgcccatggcgacgcactcgtccgggttcaggctgtggctgggctccttgcccagcagctcccgcacctgccgctccacggcgggcatccgggtgctgccgcctaccagcagcaccttgcccagctggctggcagagatgccggcatcccgcaaggcgttctgcaccggggtcacggtgcgggacagcagatcgccggtcatcatctcgaactgcgggcgggacagggcgatatccaagtgatgcggcccgtccttgcccaccgtgataaagggcaggttcagctgggcagagggcgcactggaaagctccttcttggccttttccgcttcctccttcagccgtcccatggcggcggggtcgcgagtcagatcgatgcggtcagactttttgaactccgccaccgcgtactccacgatgcgctggtcaaagtcatcgccgcccagatgggtgtcgccgccggtggcaagcaccgtaaaggtgccgtcctcgatctcaatgatggacacgtcaaaggtgccgccgccaaggtcgtagaccaggatcttctgcgcggcttcgttgtccagaccgtaggccaccgcggcggcggtgggctcgttgatgatgcgcagcacgttcagccccgcaatgcggccggcatcctgcgtggccttgcgctgactgtcatcaaaataagcaggcacggtgatgacggcttcggtgacaggctcacccagatagctctcggcgtcccggcggatcttggcaaggatcatggcgctgatctcctgcggggcaaggtccttgccgtcaatatgcgcccggtagtccgagcccatgtaccgcttgatgctggagatcgtgcgcccggaattcgtggcgatctggcgctttgccgcgccgcccaccagacgctcgccgtccttggtaaaggccaccacgctgggggtggtgcgctcgccctctgcattggtgatgaccacgggcttgccgccctccaccaccgccacacaggaattggtcgtaccaagatcaatgccgatcactttgctcatactgtttcctctgtttcttgtccgccgtgtctgcgggctgatttttctccagtctatcttaccggacggctgtgaccattttttagtccaattgtaaagattctatgttatatgctgccggagccgtgggcggctcgtgggtcagcgcatagagcagctgctcggcctcctgtaaccagcggtcggcgtccggctcgtgctcctgctgcaaaatggtaaaggcctgctttgcctctgccgcctgcgccagcgcctttttgcgggaggtgtagcgggtctcgtactgcgccagccgcaggcagacccggggcgtatactcgatatccggcaccgctgccgcgttctgccgcgcccggcggtaccacagcagtgccttgccgttgtcgccccgggcggcgcagtcgtcgccaaggttcaaaagggcgatgggctcaccactttcggctgcggctttccacagcttgcgcgcctgtgcagcgcttttgggtacgccgcgcccctgatacaggcactcgcccagcagcgatagcccggcagaactgccctgctcggcggctttctggtagcactctgccgctgccgcccagtgtccggcgcgggcagcttctttcccggcttcggcctcctctgcgccgggaccctccggggtgtggcctgcgtgcagcagaccgttgagcagcgcaccgtccagcgaggcggaattgctccacgggtccagcaccacgccgtcgatgcccggggtgtccagcgccagctgcatagcctgctccaaggtgcggtcagccatggggcggctgccggtactgcggtccgcaccggccgctgccaccgaggtgaacagcggcagccagcagcgccccttatcgttgcgcagcgtccacaaggcaaggccgtcggccttttccgccgggatgggatgctccatccacggggcgggcgcaccctgcaccgaaagcgccgtttgcagcggcaccagcacatgggtctccagctccagcgcatagttcaacgcgttcatcaaagcccagaagctctcctcgttctgccccttgtacagcccctgcaccgcctgctcgatggccgggcagccggtgccgcgcgggctgtacaccggtgcggtgcggctgcgttggctgcccaccgggcggaagcgtaccccgccgtctgttcgtcttgccattgtgttcaccatacttccctatcagtctcagctctagtataacaggatttggcagcttgtacaatgcaaaacgcagctgcggcactggattttcagtatacatcgcgttataataaggtgtattttgaccccgaaggaggaatttttttgaaccggatgcttggctacctgaagggctacgagcgcgaaagtgtgcttgcaccgctctttaagatgctggaagccacctttgacctgttcgtgccgctggtcatggcggatatcgtcaatgtgggcattgcagcacatgacctgcattatattctggtgcggtgcggccttttgctgctgctggctttcatcggccttacctgcagcctgaccgcgcagtacttttccgccaaggcggcggtgggctactccaccgcgctgcggcacgccctgtttgcccatattcagcgcctgagtttttcagagatggatacgctgggcaccagcaccctcattacccgcatgaccagcgatgtcaatcaggtgcagagcggactcaacctgtttttgcgcctgttcctgcgcagcccctttgtggtgctgggtgccatggtcatggcctttacggtcaacgcccgggcggcgatgatctttgtggtcaccatcccgctgctcagcgtggtggtgttcggcgtgatggtggtcacccggccgctgtataagaccgtgcagacccggctggaccgggtgctgggcctgacccgcgagaacctgaccggcgtgcgcgtggtgcgcgcctttgataaggagcagagcgagatcgaccgctttgaggacgccaacgccctgctgaccgggatgcagctgcacgtcggccatctttcggcgctgatgaatccgctgacctatgtgctcatcaaccttgccatcgtggcgctgctgtatgtgggcagcatcgagatcaacgtgggcggcatggcctccggtgatgtgattgcgctggtaaactacatgaaccagatccttgtggagctggtaaagcttgccaacctcctcgtacagatcagcaaggcgctggcctgcgcaggccgtgtgcaggcggtgctggatacaaagcccggcatgaccttcccggcaaagcttctgggcgaagtgcccgccgacaagaccggcgatgccgtgcgctttgaccatgtaggtctgacctacgccggggcaggcgcacccagcctgaccgatatcagctttaccgcgaaaaaaggccagaccatcggcgtcatcggcggcaccggcagcggcaaatccagccttgtaaacctcatcccgcgcttttacgatgccaccgagggcagcgtggagatctttggccgtcctgtggccagctacccccgggacgctttgcgcggcagggttgcggtggtcatgcagaaggcgcagctcttcggcggcaccatccgctccaatctgctgtggggcaacaaggatgccaccgacgccgacctgtgggcggcgctggaaacggcacaggccgcagactttgtgcgtgcaaagccccttgggctggacgagccggtggagcagggcggacgcaacctttccggcggacagaagcagcggctcaccatcgcccgtgcgctggtgggcaagccggacattttgattttggatgacagcgccagtgcgctggactacgccaccgacgccgccctgcgcaaggcactggcggcgctgcccggggcactgaccgtgttcatcgtcagccagcgtgccgccagtttgcagcacgccgaccagattctggtgctggatgacggccatctggtgggcatcggcacccacagcgccctgcgcagcagctgcccggtgtacgaggagatctacgagagccagttcaaaaaaggggaggcagaagcatgagtgcaaaagcaaaaaacaagctgaccccgcagcagcgcaaggccaccctgaaccgggtgctgcacaaaatacgtccgtacagcgcctttgtggtgtgcagcctgctggtggcggcggtcagcgtagccgctcagctgtatatccccatcctgtgcggcgacgccattgataagatgctgggcaagggcaatgtagaccttgccggggtgctgcgcattgcagtaagcattctggtggtggcagccgtagccgcccttgcgcagtggcttttgagcgtgtgcaacaaccgcatcaccttctcggtcagccgtgatctgcgcaacgaggcgctgcgcaaaattcagaccctgccgctgtcctatctggacagccacccctccggcgatatcgtcagccgcatggtggcggatgtggacacctttgcggacggcctgctgatgggctttacccagctgttctccggcatcctgaccattttgggcaccctgctgttcatgctgcgggagaatgtgcccatcacgctggtggtagtgtgcattaccccgctgagccttgtggtggcgggctttctggcaaagcgcagctacggctacttccagagccagagcaccgtccgcggcaagcagaccgcgctggtcaacgagatgatcgaaggccaaaaggtggtgcaggcctttggccacgaagccgaaagccttgccgcctttgacgaagtgaacggacaattacaggacgtgagcctgaaggccatcttcttctccagcctgaccaaccccgccacccgctttgtgaacaacatcgtgtacgcaggcgtgggtcttgtgggtgcgctgtacgccgtgcgcggcggcatcaccatcggtcagctgagcgtctttttaagctacgccaaccagtacacgaagcccttcaacgagatctcgggcgtggtcaccgagctgcaaaacgcactggcctgcgccgcccgggtgtttgaactgctggacgccgaggatcaggtgccggaggctgaaaacgccgccgcgttgcagccggacggccatgtgcagctgcaggatgtttctttccgctacctgcccgaccgcccgctcatcgaggggctctcgctggacgtgcagcccggccagcgcattgccatcgtaggccccaccggctgcggcaagaccaccctcatcaatctgctgatgcgtttctatgatgtgaacagcggcagcatcaaggtgtccggcaccgatatccgggatgtgacccgcgcctccctgcgcggcagctacggcatggtgctgcaggacacctggctgcgtgccggcacggtgcgggagaacattgcctacggcaagccggacgccaccatggacgaggtgattgccgccgccaaggctgcccacgcccacagctttatccgccgcctgcccgatggctacgacactgtcattgcagaggacggcggcaatatcagtcagggacaaaagcagctgctctgcatcgcccgcgtgatgctctgcctgccgcccatgttgatcttggacgaagccacatcctccattgatacccgcactgaggtgcgcatccagaaggcctttgcccgcatgatgcaggggcgtaccagctttatcgtggcacaccgcctttccactatccgggaggcagatgtcatccttgtgatgaaggacggccacatcgtggagcagggcaaccacgaccagctgctggcgcagggcggcttctacgccaagctctacaatagccagttcgagggcgtgcagacctgaggacgctgttgtatcctatccaaactgtaataacgaatgacgaaaatgcactttgttaaataaaacaggccgaataggcactcgttcataaaatattaataatatattaacattcagtacaccacttttcggtatacatagggcaacaaaggcgcgcagtgcgccgaacccccgccaaaaagggcaaaaacgcgcagactgctgtggtgtgcggcggtcttggaaatgcccttggtacaggaaaggaaacgttacttatgaaaattggtttttgggaacttatcgtcatcgtcatcgtggcgtttgtgttcatcggcccggaccagctgcctgtctacgcaaagaagatcggcaagatgctccgcgagctgaagaaatacaccggcgctgcttctgaggagattcagaagaacgtggtggagccgctgaacgagattcaggctcccctgaaagaggctgttgcccccctgactgatatcaaaaaagatatcgacagcagcatgcgggacgtgaccaagagctttaccggcattggcaagaccagcaaggaggaagccgccaagaagcaggctgagaccgaggaggtcaccgacctgaccgaggatgctgtggaggaactgcccgagcagcccgccgaagccccggctgaaactgtggaggctcccgccgaaaagccggagcaggccgctgccgaggccgcacagcctgccgccgagccggtggctgagcctgtgcaggaagcccctgccgcagccgaagaagccgccgaagctgcacccgctgaggaagcaaaggtgtaagcgcccctacttatttatggatgcacccgcgcccgcggttgccagatacattctgtaatacgcccgccacgcggcgcggcaagaaaaaggagatatttattatgcgtattggtactaatgaactgctgatcattctggttgtcgttctgctgatctttggacccaagaacctgccgaagctgggcaagatgttcggtaagaccatcaacggcttcaagaagggcatggaggacgaggacgccgagcagtccgaggagactgtaaagaaggctgataagaaggacgaagacgaggagtaattgtggctacaaacaaaaagcgcaaaaagaaagccgaagtcatggcagaggacggcagcatgacgctgaccggccatctgaaagaactgcggaaccggctcatcatctgcgcggtggtgtttgtggtgggcgtagtggtctcgctggcgtatgcagatcgtctgatcgatctgcttaccgccatgggccgcgactattaccagttcgtgtccattgccccgcaggaaaaactgatgcagtatttccgggtgtccattctggccggtgtggtggtaacggtgcctgtggccttttacaacatctacgcctttgcaaagccgggtctgaaaaagagcgagagcacctttttcaaactggtcatgctgctgggtctgatcctgttctgcgtgggcgtgctgtttgcctataagctcatgatgccgttcatgctgcggttcctcagcaccggcatcgagggtgctgagtacatccagaccaccaccagtatcgagagctacgtcaacctctgcctgaccatgttcatcatctttggctgcgtgttcgagatgccgctgatcaccatcatcctttccaagatgggcatcatcaacccgcagatcctcaagcaggtgcgcggcgtggccatcgtggtcatcttcttcatcgctgctgtggtcaccccgccggacatcgtgtcccagtgcatggtggctttccccatggtgctgctgtatttcgtcagcatcttcctgagcggcatcttctataagccgcgcgatacggatgaggatgacgaggaagaagaggagagcgaggactgatcccgcttctgttccggttttcatcaactgaatcaaacgccgctgcacggctgtgcagcggcgtttcttgttggcacggaaacaaaaaagctgccgcacagctttgtgcagcagcctatgagaaaataaaggagaaacgcaggttcaaaaaagattatttgcccagatgccagatatcgcggtcgtactcggcaatggtgcgatcagaggagaacatgccagccttggcaatgttcacaaggcacttacgccgccagcccgtggggtcgcaggcgtaatcgctgagggcctgtcccttgcgcacaacgtaggcattgaagtccggcagggtctggaaccagtccttgtggatcagctcgtcgtgcaggcgggtcaggttttcggcatgaccggcggccagcatctccggcccggtcaggaagctgatggcgcggcggatgttggcatcgccctccacccactgggcggggtcgtaatcgcccacggcgtagcggtggatgacctgatcggaggtctggccgaagatatagatgttctcctcgcccacctgctggctgatctccacgttggcaccatccatggtgcccagcgtcagcgcaccgttcagcataaacttcatgttgccggtgccggaggcctccttggaggcaaggctgatctgctcggacaggtcgcaggccgggatcagcttttcggcggcggtgacgttgtagttttccacgaacaccacctgcagccacttggacacctccgggtctgcggcaatgaccttggagagggtcagcagcgcatggatgatgtcttttgcaatggtgtaggcgggagcggcttttgcgccgaagatgctcaccagcggcacagcgggcaggtgtcctgccttgatctcgtagtactggtggatgaggtacaacaggttgagctgctggcgcttatactcatgcaggcgcttggactggatatcgaacacggcatcggtgttcacgctcactttctgggtgtgcagcagccagtctgccagcgcttccttgttggcctttttcacggcggtcagctcgctgagcaccgtctcgtcatcgacaaaggccagcagcttttccagctcggcggcgtccttgcggaagccggagccgatgtgcttttccagcgttgcagtcaggcgcgggtcgcattccagcagccaacggcggaaggtgatgccgttggtcttgttattgaacttctccgggtacagctcgtagaagccgtgcagctcggagtttttcaaaatctcggtgtgcagcgctgccacgccgttggtagagtgggtaaagtggatatccatgtgtgccatgtgcacccggtcgtccttgtcgataatggcaaggctctcatcctcggtgcgggtgcgtgccagcgcatccagcttttcaatgatgggcatcagctgcggcactacggcatccagataggcgcggggccacttttccagtgcctcggccagaatggtgtggttggtgtaggcgcaggtcttggtgacgatctccacggcctcttcaaactcgatgccgcgctcgcccagcagacggatcagctccgggatgaccatgctggggtgggtgtcgttgatctggatagcggcgtagtccgccagatcatggaagttgcagccccgggcggcgcactcggccagaatgagctgtgcaccggcagagaccatcaggtactgctggtacacccgcagacggcggcctgcctcgtcggaatcgtccgggtagaggaagagggtcaggttcttgtcgatggcagtcttgtcgaaggcaatgccgtcatggacgatgctctcgtcgatggtgtccagatcgaacaggttcagggtgttggtgcgcccctcgtagccggtgaccgccagcttgtacagccgggcggtgtactccttgcccgccagttccaccgggtaggtggtgtcggtcttttccgcccagctgtgggcagtgagccacgggtcgggcttttcgttctgcacgccatcctcaaaggactgatggaacagaccaaaatggtaccgcagacctacgccgtcgccgggcaggttcagcgttgccagagagtcgaggaagcaggcagccagacgccccaagccgccgttgcccagagaaggctccggctctacctcttcaatatcggaaaggcgctttccggcagcagccagcgcagaccgggcttcatcgtacagccccagattgatgaggttgttggacagcagcttgccaataaggaattcggcgctgatatagtacagcttgcgtccggtgaccggttgcacgcggtcggcactcttctgccgcaccagttccagcagtgccagatacagctcctgatcggtgcagtccgccagcagcttgccggtgatactctgtaacgtctcggtaaagctcataaaagcatcctcctttgctagggtgtatctgaaaagtagaaaattcagtctatttctttgttttcagatacaccttacggaaaacaggtttgacatctgtacctcaagatataccacataaaacgttcaaaatcttgcctaaaaagtgcaaactatggtacaatcctatcatcaggggggtggaacaatgcaaaatcaggcttctttgcaggagacaaaacagcacggagccgtgcgctttccgttcaatctgtatccctgcaccattccgggggattttcagcaggtggcactgcactggcacgagagcatggagctggtctttgtcaagcagggcatggggctggtacaggtgggcgtggtgacctacccggcctaccggggggatatctttatttttgccccaggcacgctccacgcgctgcggcaggcagagggacagcgcatggaatacgaaaatatcatctttgagccggagttgctgggcggcgcagaggacctttgcgccgaaaaatatctgctgccgctgcaaagcgggcggctttcgctgccggtgcgtctgaccccgaacgatttgtgctatctgcaagccgccgcctgcctgcgggagctggaggatgccaaccgcgccaagcgccccggctatgagctgctggtaaaaggggcgctgctgcgctttcttgccctgctcattgcgcagggcaggcagcagcttcccgccgaaaccgccgacacccagcggctgaaagcggtgctgcaatggctctccgcccattatgccgagccgctccgggtagccgatgccgccggggtctgctccttcagcgccagccattttatgcgctggttccggcagatgaccgggcagagctttattgcctttctgaacgagtatcggctgaacaccgccgccgaggcgctgcgaaccaccgatgagaccgtgctgaccatcgcctcccggtgcgggtttgagaatctttcctattttaaccgggcgttcaaggcgcatttcggcatgaccccgcgggactaccggaaaaaataagcaaagcgcttgacagctgcggctgtatggcgtatgatgtgggcagcggcttttctcggagtgaaaagttagtcaattctaactatcattttataagatattcctgaaagaaggtataaaaatgatccagacgaccgtagaagtaggcggcatggcgtgttccatgtgcgaagcccatatcaatgacaccgtgcgcaatgcatttcctgtggataaagtctcgtcctcccacgccaagggcaagaccgtgatcctttccaaggagccgctggacgaaaacgcgctccgcgccgccattgaagccaccgggtaccatgtgggcaccatccacagcgcaccgtatgaaaagaaggggctgttctcctttttcaaaaagtgatatgtcccccgccgtgttcagccgtatcgacaaaaataaggcgcaatactgatctctaccaaccattcttcttttcacctcttttttgttttccacccacagagaaacacccccggcagccgcaatggccgccgggggtgtttctgtatctttagatttgcactcggctttagtggacaaagcccacgaacaccgggcagagcacggcggtcagcacaccggctacggcaatggaaaggccgctcatggcaccttccacatcacccatctgcagcgccttgctggtgcccacggcatgggctgccgtgccgatgcccacgcccttggcgatggggtcggtgatgtggaacagcttgcacacggtctcggccagcagtgcacccacgatgccggtcacgatgacgatggcaccggtcagggcggcaatgccgcccagctcagcggccacatccatgctgatggcggtggtcacggacttcggcagcagagtagcgtactgctcctgggtcagatccattgccagcgccagtgcaaaggcgctgcccagactgaccagcgtacccaccgagatgcctgcgatgatggcgggcgcattctccttgagcagatccagcttttcatacagcgggatggccagcgccaccgtggcgggcagcagcagatagcttaccggcgcggcgctggtcttgtagtccccgtaggggatattgcacaccgacagaaaaatgatgacaaaaatactgcccagcagcagcgggttaaagatggccttgccggtcacccggttgatgagcacacccagcccaaaggctgccagcgtaagcagcacgccccacgccaccgagccggtcagaaaatcgttcagcagctcagtcatggtcggcctcctcttttttattgcgggcggtcagcgcctgcgtggtgcggcctgcggccgccatcaccagcaccgtcaccggcagaatggcgatcaggatgggcagcagcagctgtcccatctctgcccacagctccatgatgcccgcagcggcgggcacgaacagcagcggaaaaataccggtcaggtaggtgccggtctccttgacctgctccagctttacgaccccggcggtcagggctgccagcagcagcaccagaccgtacacactggcaggcaccggcagcggcagcaccgcgtgcagcacctcgcccagaaaacagaacgcaagaatgcgcccgaactgaaaaatatacttcgtgtcagaactcccctttctggtcttatggtcttataacgaacagacaacgggctttttgcccggaattttctgtctcacacaaagtaaaagtataccgcggactgcccgctccatcaaccgtgaatcttgccaagaagttctgcaccttttgcgcagaactgtacaaaaaagcgcaccgggccaaggccggtgcgcaagggtcagatcacataatcgttgccggcctgatccggcagggcaaggtctgccagtgtgatcttgccaaaatagtccgagatcagatcgttgagccccttccacatctcgtaggtgcggcagttggccatccgggcgcaggcagaagccccgggggtcaggcagcttaccggggcaaggctgccctcggtgagcatcaaaatctcgcttaccgtgtactgatccgggctgcgggtcagccggtagccgccgcccttgccgcgcagcccctccagaaagccgttctgcaccagtaccttgaggatgttctccagatacttttccgagatctcctgccgggcggcaacttcctttaagggaacatatttttcagactgatgctccgcgaggtcgatcatcacccgcagcgcatagcgtcctttggtcgaaacgatcatgatccgtacttccttccggtcaaaatttattataacccattatacaacagggtaagtcacttttcaatcctacttttttcaaaaaaccccttgacaagcagggaaaacagggctataatgccatcaaacccacaaacgatgttggttgaaaggtttagagggaatcacagccgggcaccccggcacaagacagggccatacgccccgtaacgatatcagaaagagggacaagtattatgagcaagatctataccgccgcagatcagttgatcggtcacaccccgctgctggagctcagccatattgagaaggaagagcagctgcccgcccacgttattgccaagctggagtacttcaaccccgctggttctgtgaaagaccgcattgcgaaaaagatgatcgacgacgccgagaccaagggtctgctgaaggaaggctccgtcatcattgagcccacctccggcaacaccggcatcggtctggctgctgtggcagctgccaagggctaccgcatcatcatcgtgatgcccgagaccatgagcgtggagcgccgccagctgatgaaggcttacggtgccgagctggtgctgagcgagggtgccaagggcatgaagggtgccattgccaaggccgatgagctggcaaaggagatccccaattccttcatccccggccagttcgtgaaccccgccaacccgcaggcacacatcgagaccaccggccccgagatctgggaggataccgatggtaaggtagatatctttgtggcaggcgttggcaccggcggcaccgtgaccggcgttggcaagtacctcaagagcaagaatcccgatgtcaaggtggtggctgttgagcctgcttcctcccctgtgctgagcaagggcactgccggtgcacataagatccagggcatcggcgcaggctttgtgccggacgtgctggacaccaccgtctatgacgagatcatcgccgtggagaacgacgacgcctttgccaccggccgtctgatcggccacaaggagggcgtgctggtgggcatctcctccggtgctgccgtctgggctgctatccagttggcaaagcgcccggagaacgccggcaagaacatcgttgtcctgctgcccgataccggcgaccgctacctgtccaccccgctgtttgctgaataatccccaaaaaactctcctctcccgctctgcaccccgcagggcgggagtttttgtttggggacaagactatttgaaatggcttccgctgcgctctagccatattcagcggaagaattatttgatatttcgcgtttggagcgaccgcgtttgcggagcgtagcgtagcaatgaaagccccagtggggcttttaagcggcagagcggtctgcgttagcagatggaggggcgttgccccgacaagctctgcggagcgctccaaacgctattttcacagaaggggtcgtaaagggaaacggcaggtgcagcgccgctttctgcgaaagcgcggcgctgccggcgtgcccgctccccggggggagctgtcgcgcagcgactgaggggctttgaatcggcggagccggaaaaaacggttaaaagatcttcacgccgaacaggcgtgaatcttcagttttttccggtgcagcccacccctttggggttaaaaggggcgagcagcccctttttcgtggctccagcgcgtcgaaatcgctggcacttttctggttctcttttggtgtcaaaagagaacatcccccgtcccctcctcttttccctcacgcaattttatgctacaataccggtaacaaaaacgtttggagaaacgcccatgctttattatgctgcccccatggagggcttcacagaccgggtctggcggcagacccatcagaaatggttcggcgcacaaggcgctgccgacctctattatgcgccgtttatctccccgccggagaaccgggtgctcattaaaaagaagatggcagagcttgccccggaggcaaaccccggtgcgccggtcatcccgcaattgctggcgaaggacggcgagctggctgcatggatgatcggtcagctgcgggcgctgggctataccgaggtgaacctgaatctgggctgccccgccgggacggtgaccgccaagggcaagggctccggaatgctgcgggaccttgccaaggtggacgcctttctggacggcgtattctcccatgccgaggggcctgtctcggtcaagacccggctgggggtagagaaaccggaggagtttgccgccattctggaaatttatagccgctaccccatctcggagctgaccatccatcctcgggtgatgcggcagcagtaccgtgggcaggccgaccgcgccgcctttgccgctgcgctgccccggtgcactatgccggtgtgctacaacggcgatgtgaccaccgccgcccagctccacgcgctggaaaaggagttccccgccctgtccggcatcatggtagggcgcgggctcatcgcagaccctgcactcttccgcaaagcacggggcggtgcacccgccaccaaagaggagctgcggggctacctgaccgacctgtaccacggctacaccgaactgtttggcagcgcaggctgcgccatcagccggatgaaggggcactggttctacctcatccactgctttgccggggcagaaaagctggaaaagcaactgaaaaagctgcgggagccgtgggagtatgaggtggtggtgaaccagatcttcaccctgccgctggtggaaaacgattaaaatggtctccaaaaccatcctatccataataaatgaggcttttccctgcgaccccacccgtgaaaatggggttcaggaaagtccgcagactttcctgaaccccgaaatttaaaataatctttcctctgaacatggccagagcaacgcggaggccattcccaatcgtcccacgcgcaaaaaaagcccgccgtcttgcaagacagcggggctgaaaaggaccgtattacacgttgaggtagctgcgcagcatagcctgcagcagatcgtcacgatccaccttgcggatcatggcacgggcattcttataggtcgtaatgtaggtagggtcttcggacaaaatgtagcccaccagctgattgaccgggttatagcctttttccttcaaagcatcatacacctgttgtacgatctcgtggatctcatagtcctttttatcgtggatggagaaaatcgcggttgcgtctcccacgcaatacacccccttcggttgaaactagtcccattgtacacgaattgcgccgaaacttcaagataattacgctggatttgcacatcctgcacaaaatttccagcaatgttccggcaagatgaacgatgtccgggcggcattctgcccgcgaaaggagcctttgtatgctttacggcatcggctgcgacctgtgcagcctttcccatctggaaaaaagcctttcctctgctcacgcggcggcctttgtgcgccgggtatacggcccggccgagcaggcggcactggggcttttggaggcctcccctgcgccgctgaatgcccaccgccttgccagcgccgccgcagattttgccgccaaggaggcctttctcaaggcggcgggcaccggcctgcgggaacccttttctctatgtgagatcgaggccgtccggcaggagaacggtgccccggcttaccgtttcagcgggcagactgccgcatgggtggcgcagcaccggctgcgtgcccggctctctttaagccacgagggcggcatggcgctggccttctgcacgctggaagaggaaagctgaccaccctttgtgcatacaatggaatatcgcccccgcactgcataagccgcaccccgcctgcgcatactgagagcagacaggatgcgccggacgcatcacatagcggggcacatcctccagacaaacaggagggagattccatggaggtacacagaggagaagttttctacgccgatctttcgccagtggtgggctcggagcagggcggtgtgcgcccggtgctgatcgtacagaacgagatcggcaaccggcacagccccactgtgatcgcggcagccattacatcccggctggacaagacccgcctgcccacccacatcaacatccgggcggcagacaccggccttgccaaggacagcgtggtgctgctggaacagatccgcacgctggataagcaccgtctgcgggagcgcgccgggcagatcaccgccgccgaccagaagcgggtggatcaggcgctggacgtaagccttgggctgagctcgtactgaaattttatttataaagcagagacaccggagcgtccacagacgctccggtgtctctattttttagtattactcgatcaggccgttgagcagggtcaggcacttgcggctgtgcagcttgcggatggccttggcttcgatctggcgcacacgctcacgagtgacgccgaagtcgcggccgacctcttccagcgtgcggggacggccatcatccagaccaaagcgcaggcggatgaccttttcctcgcggggggtcaggctcttgagtgccagattgatctgctgtgccaccatggcgcggtcggctgccttgccgggtgcttcggcgttctcatcggcgacaaaatcgcccagagaggaatcctcttcctcacccacggggctttccaggctggcgggctcctgtgccatgcgctggatctcgcgcacgcgctccacgctcatatccatggcctttgccagctcctccggggtgggctcgtggccgttctggtacaccagctggttggtggcctgacgcatccggttgatggtctccaccatgtgcaccgggatgcggatggtgcgggcctgatccgcgatagcgcgggtgatggcctgacggatccaccaggtagcgtaggtagagaagcggaagccgcggtcgcagtcgaacttctcggcggccttgatgaggccgatgttgccctcctgaatgagatcaaggaaggccagattatggccgacatgcttcttggcgatggacaccaccagacgcaggtttgcctcgctcaggctgcggcgggcgttcaggccgtcgcggcgggtcttgagcagctcctgacggcgttcctcgctcagggggccgttctccacggcctccatggccttttcctcgtctgccttttcctcggcatcctcggcagacttttcgccgtcctcgtccagatcctcggtgtagctgcggctgttctcgtcctcctcaaaggagaagcgggcgctgttcttcttgatgtactccggtgcgccgtacttctggcggtctgcctgcaaaatgtgtgcagcctcggcaccggcatggatgcggcggctcagctccacctcctgctcggcgctcagcagcgggatctgaccgatctgcttgaggtagttcttcaccgggtcgtccagcagctcgtccatggcagccttcaggtctgccgggttctcctcggcatcctcttcgttttcatcggcaaggcccatgtcatcgttgttgttctcggcgttctccacctcagcaatgatgctgtccacgtccagactcggctcgttctcttcctccaggaccttaatgccgcgctcctccagcagggtgtagagggtgtctacatccatgcggcattgtgccgccagcgccttggcctcctgtgcagagagggtgccctcgcccttagtcaacagttccttcaaagtcatgcccattttttctctccttcccactccggggaatttcctgtaatattgccctgtgcatcagatcacaaggccgccgttcaccccgaacacctgtccggtgatgtatccggcatcctcgccggccaaaaagaccagcagctttgcaacttcttccggggtgccaagccgacccacaggggtctcctcggccagcgccgccttgtcctcggcggtaaaagccgccatcatgtcagtctcgatgaccccgggcgctacgcagttcaccgtaatgccgctggggccctcttccttcgccagtgccttggtcaggccgatgagcccggccttcgcggcggaatagtgcacctcgcagctgccgccggtctggccccacatactgctcacggtcagaatgcggccctgcttgcggcggatcatgccgggcaatgccagctggcacaggtggaacgcgccgctcaggttcacgtccagcatccgctgccactcctccggggtgatgtcggtaaacagcttctgctgcgcgatgccggcgttgcacaccaacacatccaccctgcccatggcctgctccactgcgtggaacgccagctcacagctggcgcggctggctacatcgcactggatggcgatgcacccgggcagctgctgttccagcgcagcggcagcagctgcgttctggtggtagagcaccgccacctgataccctgctgccgcaaaggcgcgggcagcggcagcaccgatgccccggtcgccgccggagatcagcacccggcgcgccgcagcgggtgcggcaggggcaggccgctcttttacaggctgcggcgcaggcgcttcgggcagctccaccgcaggcggctctgcgggcttttccagcgtgatcacccgggtgggttcgtccaccgcaggcgctgccgtttttcccagcgtcatgatgcgggtaggttcatccaccaccggttccaccggcgcagccggctttgcagccggtgcggcaaggggctccggtgcgctctcttcctccggcacttgaaaggtcagttcaaactcgtcctcgtacaagagtatatccctcctgttcggtattctcggccgggcgcagtgccccagccggaaaaaccctgtgcccatccccagacagtgcagcgttccgtttatgtgtccggcaaaggtccggtgctttggcgtgcctgcctgcagttgcgatgggtttcgacaagattccattgaataatataccacaatccagcccaaaaagaaagtgggaactgcaattttttacgcagttcccactatttttccttattttcccctgttttcgggcaccgggggcttccagcggggtctgcccgcccgcttttcccgcagggaaacaaaaaacgcctgcaaaagctgctgcgcctcggcctcccgcagccccttttccactaccggatggtggttgaagggcagcgcgaacaggtcggtcaccgagccgcagcacccggccttggtgtcggcagcaccgtacaccacccggcgcagacggctgttgatgatgccgcccgcgcacatggggcagggctctaaggtgacgaacagttcgcactcccacagccgccagccgcccagcgccttgcaggcagcgtcaatggccagcagctccgcgtggtgcaaggcgtttttctcggtctcccgggtgttgtgcgccgtagccaccacctcgccgtgccgcgccaccaccgcacccaccggcacctcgcccaaggcggcggctttggcggcttcttccagcgcaagacccatcagttcaaaatcggtcatgtatcccatcctctcatcccatcgccagtaccagcagattgtttgcactgtgcagcagcatccccggccagagatgtccggtgcggtctgccagccaccccagacccagcccgcacaccagcgcatagaccatggcagcgacgctgccgtgctgcaaggcaaacagcaccgcctgcaaaagaatggcctgtcccctgcccagcggctgcgcccggcgctgcaccgcgccccggaacaccccttcctccgccagcggagccagcaggcagacccggaaaaaccgcgccgcgccgccgggcggcacgggcagcagcaccgccagcgccttgcccgccagcagataccctaccgcccagccaaaggccgaaagcagcgcggcggtgcggggattcagcttgtgcatggtcggtctcctcctgctgtgattcgttcccggttatagtaccatatctgccgccgggtgcgcaaggtttgggcgttctgtcgtggcaaatttatgcaaatcattgacacatcgccctaaatggtggtataataatttccaacctttttagcaaaaacgttgcgtatactgtattttaccggtagaccggaggtattattatgatccgtatcctcaccgattccgcgtgcgacatcctgcccgccgaggcgcagcagctgggcgtgaccgtgatccccctgaacgtgacgctggaggacggcaccgtcctgcgggacggcatcgacatgacccccagcgaatactatacccatctggcagcctgccgcaagctgcccaccaccagccagcccagcccggagcagttcgagcggctgtatctggacgccgctgccgccggagacgaggtgctgggcatctttttgtccgatgcgctgtccggcaccggtcagtgcgccagacttgctgccgaccttgccaacgtggataatgtggtgttcgtgaacaccgagaacgtctgtctggggcagtccttgctggtgcggctggctgtgcagctgcgggacgccggcaagacgatcacccagatcgccgccgatctggaaaaggccaagcagcacctgcatctggtagctgccgtggacgatctgaagtatctgcgcaagggcggcagactgtccgccgccgcagctgtggcgggcggtatgctgggcatcaagcccatcctcgccgtcatggagggcaaggtggcgctggccggtaaggcacgcggtctgcccggcgtgtatgtggcgctgttcaagaagatcgacgagatgggcggcatccacccgggctacaccccgctgctgggctacaccgtcaaccaccgggagctgcagccgctgctgacctacctgcaggacaacctgcatctggacgcaccgctggtgcgccagatcggctgcgtcattggcacccacaccggccccggcgcattcggcatcgcgttctttgataaagagctggcgctggaataaaacctattagcaaaaacaagtcggacagcccgcgggctgcccgactttatttttacccgtgaaaaagtagtttcgaaacgcccgcaggcgtttcggaactacaaataaaatattctttccgctgattatggccagagcaaagcggagaccattccaaatcgtcccgccttgcccttacagcaccgcgtccgagatcagcttgcccagcagcagaaccagcaccaccagcatcatggggcggatgaagcgggcaccctttttcagcgcgaagtgcgagcccagcaggttgcccagaatattgctgactgcacaggggatgccgatgtggaacaccaccagaccgttcatcaggtaggtgaacaggctggcgtagttgctggccagattgagcaccttgccgttgccgttggcagtgcgcaggtcaaagcccatcagggtggtaaaggcaatgatggcaaaggtaccggtgcccgggcccataacgccgtcgtacaggccgatgccaaagccgatggccagtgccagcaaaatctttttcaggtccagcgtgccgtcgtcccggttctcgtccggcaggttgcgctgccacagaatgatgaccgccgccaccggcaggatgatgaacatcatggtgcgcagcatctcatcgctgagcagcagcacgatgtgcgcgcccagcgcactgcccgcaaagctgccgatggctgcaagaacacccaccttcacgttcatggcaccacttttgaaaaagcttgccgtggcaaaggtagtgccgcaggcggcgctgaacttgttggtggcataggtgtagtggggcggcagcccggcaaacagataggccggcaggctgatcagcccgccgccgccggctgccgaatccacaaagcctgcaaagccggtcatcagcatgagaaacgccatcatccacggcgagatcgtgatacccattgttataattcctcttatctttccaagtcgtttgttctttttcaggggacgcgcgcctcagaccatataaaacctcccctcgcagggcaatacacagcccgggatacccgcacacagcagggcatctccgggcatttttgcaattttttgacttgatattacagattgtttttaaagaagcggtaagcgttgcgccagtagatggcctccacctcgtcctcggtaaagccctcgcggcgcagtgcctcggccagcagcggcatatctgccgccgtttccagctcgtgctgaccgccaatgccgtcaaaatcgctgccaaggctgatgacctcaatgccgcccacctgcttgaagtgtgccgcgtgctttgccagccgctccaccgtgctgcggcagagcttcgggtgtgccgagtctgcgtccacaaaggaagcgcagtagttcagccctgcaatgccgcccttttctgccaatgcgcggatcatctcatcggtcaggttgcggttgtggggcgacagggcacggcagttggaatggcttgccgcaaagggacgggtgctgtggtttgcgatgtcccagaagcccttatcggaaaggtggctcacgtctgcggtgatgtgcagcttttccatctcttccaaaaaggcaaagccccgctcggtcaggccggtctcggtgttggccaccagcggcccgccggggtttgcgttgggggctgccagctcgttggggtagttccatgtcagggtcatcatgcgcacgcccagttcctgcagccgccgcagcacgcccagactgcccttgcagcagccgccctcttccaccgtcagcatagcgctgaacttgccctcggcgcggttgcgctcaaggtcggcggcggtgtacaccggggcgatcttttccggataagctgccatgagccgcttgaagatgtcgatctcctccagcacgctcaccagcgggtcggccccgggggcggggtcggccagatccacataggccgcaaagcattgcagcagataatccccctgctgcaatttttcaaggtcgatatgcagatcgttgtgcaaaaagcttttgggtgcgcccgccttttcggcgcggcgcagttcgtacagggtatcgcaatgcagatcccaaaccttcatgatggatacactcctttatgcttcttctcccagcagctgcagcagctgttcggggttcatagacaaaatcgcgccgtctgccccgccggtaacggtgtcggccagtgactgcttggcctgctgcagctccacgatcttttcctcaatagtgtcctgcgcgatcagccggtacacctgtaccgggttgcgctgaccgatgcggtaggcgcggtcggtggcctgattttgcgcggcaaggttccaccacgggtcgtagtggatgacgatatcagcggcggtcaggttcagacccgtaccgcccgcccgcagcgaaatcagaaagacgtccgcctcgccctgattgaaccggcgcacctgctcggcacgcaccggcttcggggtagagccttgcagggtgaagtggctcaccccggcctcgtccagccgctttgccagcagttccagcatggaggtgaactggctgaacagcagaatgcggtgcccgcccgccactgcctcggtgacaagttccagacaggcttccagcttggcgctgctgccggtccagttgtctgccacaagacgcgggtcgcagcaaatctcccgcagccgcatcagcacggcaaacacggtcatcttgtcctccggctttgccgcccgcagcttttcccgggcgtccaccaccgctgccagatacagcttgcgctgctcggtctccagctcaacgcggcgcacgttctcggtcttgggcggcagctcccgcagcacctcggacttcatgcgccgcaggatgaaggggccggtgaattggttcagccgccgcacggcgttggcatcctcgtcctgcacgatgggcttttcaaaccgggcgcagaaggtcttgtaggggggcagataccccggcatcaaaaaggagaagatgctccacaattcgcccaagcggttctccaccggggtgccggtcagggcaaagcgcacccggctgttcacccggcacaccgccttgtatttctgggtggtgtggtttttgatggcctgcgcttcgtccagaatgcaggcgtaaaagctttgcccggcatacagtttttcgtcccggcgcagcaggtcgtagctggtgatgacgatgtccgcctgcgcccacccatcgaccagcgcggcgcggtgggcggcatcgccgtccatggcaacactttgcagctgcggggtgaacttctggcattcctcctgccagttcagcaccagcgacgccgggcagacgatgaggctgggcagctgctgcccgccctccttcatggccagcaggtagctgagcacctgcacagtcttacccagacccatatcgtcggccagaatgccgcccatgccgtagccgtccagcgtgcgcagccagcggtagccgtcccgctggtatttgcgcagggtcttttgcagcgagagcggcggggtatactcgctgtcccgcacggcgtggaagctgcggctgatgcgccggaaggcatcgtcccggtcgaaccgcaagccgttctgccccgaaagcgcccagtccagcgtgggggcacggtagagcggcagggcggcgtggccgtccttcagctttgcaccggaaagttccagcgtgtcgttcagctcgtccagcccttccagactgtcatccagccgcagcagactgccgtcccgcaggcggtggtagcgttttttctggtgcagggactgcaaaagctcccgcagttcctccaccgggaacgcgccggtgtccacttccagatccagcacactgccgtgcaccgatacccctaccgaaattttaggcggggcggcttgtaagttgcggaaggcatcggtctggtacacctcgcccatggccagcagggcgggaatgccctcttccagcagctggaaaagcgcctcctccccggaaaggctgtaatgccccggcttgccggtctcgggttccagataggtctccagcaggcgctttgcccggttctcggtgcgggcatcccgcaaaaggtcgggcggcaccggctcgccgggggctaccctgtcctctccgtacagaaagaccgggtaggccgtgacggtaagcccccgatcggcgtccagataaaactgcaccaccggttccagcgggatctggttcagcagcagccggtcggggtccacgatgttgacccggttgcccagttccggcagcacatagctgcaaaaagcggcggcgtctgcgctggtaaagaacaaactgcgcccgccaaaggtgtccagtaccggcagcacccggcggcattcctcccgctgcatccgccagagggtactttcgcccagcagataggcatagtccagcccctgcaccccgctgagtgccggggtgcagcttagctgcacgccgcccttgcggcgttccaccttcaggctgatgaccggcaagccctctttaagggtatagccgcccacaacgccctcggcggcgtaaagctccacaagagcatccagcccttcgccggtcagcggcagaccacccgccgggcctttctcccagccggagcgcaccgtgccctcggcttcaaacgcctgccgggcgctcacctgacggcgcagcagccgcagcaattgctgcgcatccggggcaaaagcgtcccaccggtgcacaaaggccagcgacttcccgtagctgacgctttcgccccgctcgatcgcatccagaaactgcgggatgctttttaccagatactgccgcccgccgatgccatccgagacccgcagtcgcagccagatacggccattgtgcggcgtaagctccggttccagcagagcaaagccggtgcgctgggcagcgttctggggctggggctgcgcatcctcccgctggtagcgcttcaacagcagctgggcctcatagtcggtctccggctcctcgccccgccacttgcggccgaacagcatatccagcccggcgctgtaactgtccttgcggggttcggtgctcaagcctgccacgccccgctgcaccccggggatgctctccggctttttttccggagcaggcggatttttttccgcgtcctgcagcagcagcgcgccaatgtgcttacagtaggtgccgtcgccgttttgattataggggcagtcgcaggaggcgctgacaaagctgccgttttcccgcagccagacctgcgtataatagcagtccggcccgctgccctgcaccagcgctgtcaggtgccgcaccccgtcctcgttggtggtgcagctgctttgcaggatgcgcttgcggtacttctgtgcccgctcaaagatgcttttgcccagcaatgcgcggatctcctgtgcgtccatgtggtctccctcccctgtgctgtcgcggttccggtctattctataagaataccgcgttccaccccgggatgcaagggcagaagggtaaaaaacgtttagaaagcgcgggcgggatgattttgaatggcttccgctacgctctagccattttcagcggaagaattattttgatttgcagtttcgaaacgcctgcgggcgtttcgaaattgctttttcacaggaggggtcgtagaggaaaacggcatttgcagtgcctgtttcctgcggaaacatccgcactgcggggttgcttcttggctctcaacaggtcaaagaaaaagcacccgcgaacgccttcgggtgccaatgcacagacgggaagggttgcaggtgctttctttattttaggaaattccgcgcttgcgggtcttgaggtggtacatttcctgatcggccttatcgatcaggtcgtgcacggtggcgatgtccggctcaaggcgggcgcagccgatgctgatctcgatctggtagggcttgccggaggcggcgttggcggcgtccagctcccgctggatggaggcgatcagggtgcgcacctccacgctgttgcagccgcaggcgatgcagaattcatcgccgccgtagcgcgccagcacgccgttatagttggcgcacacctttttcaaaatgcccgccagcagcaccagcgcggcgtccccctccaagtggccgtattcatcgttgatgtgcttgaagtgatccatgtccatcatgaggaagtgcagcgagcggttgggatggcggcggtaatagggcagctcgctttccagatagcgcagcgccacgatacggttgctgacgccggtcagggtgtccaccgtgaacttggtctgcaataccagcacatacacgcacaccagccccagcgtaatgccgcagcacagcagcccgcgcccgggcagccagccttgcagcaaaaagcctgccgccggcgcaagcgcgagcagcaacagggttttcagttcctctttgggtgtttcctgcttccagtggctcagcgtccagctgcagcggagaaaggctgctgccagataggcaagccccaccagtttcgccccccagaacagggtgctgccccgcagtccctctgcgtccagatagcaaaagccgttttcgtcccgcgctgtcagcagcaccagcaaaagcagtgtcaccggtgcggcgctgagtgccagcctgcggccgtcctccatccatgtacgccccagctctgcctccacatacaaaaacaccagcaagcagcagcacgccgccagcagataaaacaaaatactgcccccagcgttcagccggtaggtcaaggggatgcccagctcctcccacgcgcccagctgcgccagcgcactgccataatctacgatcgtcagcgccccggcaaaccacagcagcgccgtaaactgccgcccgggcaggcttttatcccgcattttctgctgcgcccgcagcaagaccgccagtgtgaccagacagagcccactgacctgagtatgcgcaatcgcatccatgccgcaacgctctcctttaccctagggcggctttgtgccgtcccgacccttttccgctcttccaacgttcctttttcgcacaaacccattgtaccaaatccataacaaatatgcaacacaaaccgaaaaattcgtacaaaaaaagacaccggaacgtctttcggcgttccggtgtcttttgaactcaaatcactttgcctgcggatgggcggcatcattgcgcagggcgctttcgcggatcttttccagcgtctgctcgctgaggatatgctctgccttgcaggcgtcctcggcggcggtctgctcgtccacgcccagctgcacaaagaagtgggtcagcagctggtggcggctgtaaatgcgctgagcgatctcctgcccgggctccagcagggtcaggttgccttcgccgtccaccgcgatatagccgttctcccgcagctttttcatggcgatgctcacgctggctttggtaaagcccagctcattgacaacgtcaatggagcgcactttgcccatacgctggctcagcatcaggatcgtttcaagataatcttccgcggactggtggatctgcatggtttgtccggcctcctgccttattccctctgggggatttttccgacagggtatgtgtaccctctgtcgtatgttaaaggatatcacatttttgcggttgatgcaagcaattcgcagcaagtttggttaaactaaccatatttctctgcacagaactgctgttttgtcggttttgcaccgctcctgttttgtgcaaagggtgcaatttaccgcgccgccagataggccgcagggccttcctcgtacagatcgccgccgtgggcgtccagcacaacggtcaggggcatatcctgcacggtcaggcggcgcaccgcttcacagcccaagtccggccatgcgatcacttccagcgtctgcacgctttttgccatcagcgcaccggcaccgcccagcgcagccagatacaccgcaccgttgcgcaccacagcgtctttgacggcggcgtcccgcttgcccttgccgatcatgatcttgttgccaaggtccagcagccgggggctcatggcatccatgcgtccgctggtggtaggccctgccgagccgatgacctcgcccgggcgctccggggtggggcctacataatagatagcgctgccttccagcgcaaagggcagggtctcgcccttgtccagcgcttccatcatccgcttgtgtgcctgatcccgggcggtgtacaccacaccggaaagcagcacggtatcccccgctttcagcggggccagatcctgcgcggtgcagggggtagtcagtctgtattccatcgttctcccctccttacagctccgcgctggcgcggcgggtcacatgacaggaaacgttcacagccaccggcagacccgccacatgggtgggcatctgttcaatggcaaggccaaggcaggtggtcttgccgccaaagccctgcgggccgatgcccagtgcattgatggcggtaagcagctcctgctccagctgcgcgtagtaggggtcggggttggggatgtccagcgggcgcagcagcgcctttttggcaagatacgccaccttgtcaaagctgccgcccacgccgatacccagcacgatgggcgggcaggggttggagccggcctgctttacagtatccaccacgaaccttttaaagccctccacgccgtcggcgggcttgagcatctggatgcggctcatgttctcgctgccaaagcccttgggtgctaccgtgatgcggcagccctcgccgtccaccagatgcaccgtgatggccgccggggtgttgtcgccggtgttgccccggcgcagcgggtcggccacgatgctcttgcgcaggtagccgtccgtatagccccggcgcacgccctcgtggatggcggcttcaaagctgccgtcaatgtgcacatccgtgcccagctccacgaacacgcaggccatgccggtgtcctgacagatgggcaggtctttttcctttgcggcgctaaggttcgaccacagcaggtctaacgtgttctttgccagcggccacggctcttcctcccgggctttttccagcgcggcctgcacgtcctgcggcagctgggtgttggccttgatgcagagccgcgccaccgtatccgtaatgctctgtgcggagatcgttctcatgcctgtgccctccgcttacagccgtgccacgccggtctcgcgggcagcttttgccacggcatttgccacagcttcggccacgcgggggtcgaacgcgccggggatgatgttctcctcgctgcggtcggcatcggtgataaggtctgcaatggcgtaggcagcagccagcttcatctcattgttgatatcccgggcgcggacgctgagcgcgcccttgaacaggccggggaagcacagcacgttgttgacctgattggggaagtcgctgcggccggtagccatcacccgcacgccgcccgccttggcttcatccggcatgatctccggggtggggtttgccatggcaaagacgatggcgtccttgttcatggtcttgcacagctcggtggtcaggatgccggggcgggacacgccgatgaacacatctgcgccctccagcgcttccttcaggccgcccttgatctggcgggggttggtcacctcgcccagccagttcttgtgggcttcggcgctgttgcagcccttgtacagggtgccgaactgatccactgccacgatgtccttggcaccggcggtcatgagcatcttgatgatggcggtaccggctgcgccggggccgttcaggacgatgtgcacgtcctccatcttcttattcaccacgcgcagggcgttgatgagggcggcggtgaccacgatggcggtgccgtgctggtcatcgtggaacacggggatgtccagctcccgctccaaggtctcctcgatctcgaagcactccgggctcttgatatcctccagattgatgccgccaaaggtgggtgcaatagccttgcaggcggcaataacgctggcagcatcgtgggcgtcgatgcagatggggaaggcgtccacgccgccgaactccttgaacagcacagccttgccctccatgaccggcagaccggcttccgggccgatatcgcccagacccagcacggcagtaccgttggagacaacggccaccatgttgcccttgaaggtgtacttatacacatcgtcggggttttccttgatcttgcggcagggctcggccacaccgggggtgtaggcggtggacaggtcgtcgcgggtggcgacctccaccttgctcacgatgcccacctttcccttgtgggtctcgtgcatttccagagctgctttattgtaatccatttaattttcctccgttacggttcgcatcctcgccctctccgtctgctcactgcgttcgcatccacctcccccaa

SEQ ID NO: 13870 - DNA, 3491 bp, Unknown
  gut microbiota DNA sequence
tgcggcatttcccgcccaaaagcgggcaaaagtgatacctgtgccgggcggcatttgtggaattttagcaaaaatcttttcttttcgcatttttccgttataatagtaaggtatgatatttgcattctccgtgaaaacggtctgctatttttaggaggtatctcttttgaaacgcattaccaagatcctgttgtgtgtgctgtgcgcggtggctgctgtgctgtgcgtagctgcggcctgctttatgctgctcaaaaagcagagcggcaccacggcatcctctgccgcatccggcgcaagcgtgtccacttatggcaaggtgtcggatttcgactacgccagcttcgattattccgagggactggacgataacggccactggaccggcatccgcgcactggactatgtgaccttgccggaggatgtatccgcgctgccgctttctaaggcagacattgagcccaccgagaccgagatccagacccagatcgacactttgctgaaccagtacgccaccacccagaacatcatcggccgggcagcccagagcggcgacactgtgaacatcgactattccggcgcggtggatggcgtagcctttaccggcggcaccgccaccggctataacctgacgctgggcagccacaccttcattgacggcttcgaggatcagatcatcggccacaatatcggtgacacctttgatgtaaccgtcaccttcccggagggctacggcgactccaccgacgccgagggcaacaccatcaccctcagcggcaaggaagccgtgttcagcgtgacactgaacgccatcacccagagcgttgtgcccaccctgaccgacgagtgggtggagacgaactttgccgccagcgacgatctgcacaccgcagacgccctgcgccagtactttgacagcgccttgtacgccaacaatctggacaacgccgtgatggactatctgctcaccaattccactttcaaggaagttcctacccagatcaccagctactacatccgtatgttcctgaactaccactcccagctggctacccagtacggcatggagctggacgcctacgcacaggccaagggctacgccgatgccaacgcgatgctggcagattctgacgcctactttgagcatctggccaagcaggatctggtctttcaggccattgcggaacagctggatatcacccccacgcaggagcagatcgacagtgccaacagctcctacgccgacacctacggcgcacagcgcagtatgctgaacgccttgcagctggctgtgctggacaaggtggaggaaagcgcggtgctttcctgacagcatctataattcactgaagaaaaacaaaggccgctgcacggtgaggtgcagcggcctttgttttccacatttttactttgcagtgttgataaagctgcggttatcccacaggtacttgatgccggagatggcggtcacagcagccaccagccagcacagggcgatggagatcaccaccacgatggaaacgctttccaccgtgccgcggtagctcagggcagtgccgaagaagtagaagatgatgctcagcatctgcaaaacggtctttaccttgccccacatattggcggcgatgaccttgccgtccttggcaccggcggccaccatgcgcagaccggacaccgcaaactcgcgcgccagaatgatgcacagcaccaccgggctgcacacaccatcccgcaacatatagatgaaggccacggtggtcagcagcttgtcagccagcgggtcggcaaacttgccgaaatcggtgaccatgtgccacttgcgtgccagatggccgtccagaaagtcggtgaagctggcagcggcgaacacgataccggccagcaggtagaaggcggcgttgaatgtaccgtccacgataccgtccagaccggtcagggacacaaagatcatgaacaccggcaccagaatgatgcgggtcagggtaagcttattgggcagattcataggttttatcctccaattcgttattttacgaccgtaccatacagatcgtaaaggtcgctgtcctctaccagcacatcatagaactggccggggtacagcggttcctcgctggaaacgcagacgcagccgtccacctccggcgcatcgccggtggtgcggcagaggtacaggccgttttcctcgtcgatgccgtcacacagaacgtgcacggtctgacctaccttttcagcctgcttctgcgccatgatgccggtctggatctgcatcaccagctcagcgcgcttgtccttgacctcctgctcgatctggccgtccatccgtgccgccacggtgttttcctcggcagagtaggcaaagcagcccagacggtcgaactgcacttccttgacgaagttgcacagatcctcgaactgctcctcggtctcgccggggaagcccgcgatcagggtggtgcgcagggtgatgccggggatctcgcggcgcagcttgccgatgacctccagcaattccgcgcgggtggagcggcggttcatgttcttcaggatggtatcgttgcagtgctggatgggcaggtcgaggtagggcaccaccttctcgttgcgcttcatggcggcaataaattcatcggtgatgcgctccgggtaggcgtacatgatgcggatccattccagccccggcaccttgttcagcttatccagaagctcacagatgctgccgggcttgccccagtcctcgccgtaggcggtgggatcctgcgccacaacaataagctccttcacgccctcacccgccagccagcgggcttcggctacgcagtcggccatatcgcggctgtgcagcgggccgcggatgcccgggatagcgcagtagtggcagcggttattgcagccctcggcgatctttaagtacgcatagtgggcgggcgtgccgatgacgcgcttgccgcccagcgggaagtcctttttggcaccgtagctttccagatgatcctcgccgtggaacagccgctccacgatggtgtcaatggccttgttggaggcgcagcccacaacagcatccacctcggggatctcttcctcgatctggcttcggtagcgctcggccaagcacccggtaacgatgaccttcaggttcgggttctgctgcttgtaggcacaggcttccagaatgttttcaatggcttcggtcttggcgctctcgataaagccgcaggtgttcacaagaatgacatcggcttcagccagatcggccacggtctcgtgcccggcagacagcaggatgtgcaccatcacatccagatccacctgattcttcgggcagccaagggaaatacacgcaattttcataagggatgatactctctttctcttttgagggatgcttttgaatttttacgatttgaggatttaaaatgcgctccgcattcgctttgcgcatcatcagcggaagaactattttaaattttagggttcagaaacgcctgcgg

SEQ ID NO: 13871 - DNA, 16364 bp, Unknown
  gut microbiota DNA sequence
gttgtagatgaggtagtccagttccgtcctctgcgccatggtcacgtccaattcatcctcgaccccagtgcagtcaatggagattcttctcccatcccggagcagcagttccacgcagccggtgtccatgttgaatttgcaggttctttcatcgtacttcatactcgtgtcctttctgccttacggcactctttcagtggtctgtcgtgctttcttatgataaggtctgggacgtttctcgatggaagcaagggattcgttctgttttccgaagaatataaaaaatccgaacccttctcctatcgagaaaaggttcggattttcatggtttggtgcgatggaagggactcgaacccccggcctactgattcgtagtcagtcactctatccagctgagctaccaacgcatacgttccgttcggaacatgatgtattttatcacgaagggcgaggtttgtcaacagcttttttaaaatatttttatattttccaaaaaagaacgtcttttctttgattttactgcggcttttctgtaattcttctgccgcatcggcgcaaaaagcggcttctacggccgctttttgcccgccgggcgggggagagtgggcgtggcgctcagccctcctgcgccagctgacgggcgatctttacgccggtgggggtggcggcaaggccgccctgaccggtctcgcgcaggtcgggggagagcagactgcccacgcggcccatggcatcgatgacctcgtcgcaggggatggcgtagtccacccccgccagcgccatgttggcgcaggagaccgcgttcaccgcgcccaccacgttgcgcttgatgcagggcacttccaccagacccgccacggggtcgcagaccagacccagcaggttgcccagtgccatagcggcggcagcggcgcactgctccggggtgccgcccttcaggttacacagggcggcggcggccatggcgctggctgcgcctacctcggcctgacagccgccctctgcgcccgccagcgtggcgcgggcggcgatgacctgtccgaagcctgccgccacatacagtgcgtcgcagacggcctcctcgtctgcctgcccggcgcgcgccagcggcagcagcaccgccggcagcaccccgcagctgcccgccgtgggcgcggctacgatgcgcttcatgcaggcgttgcactcggcggtttttagggcttccgctgttactgcggccagataatcatcgcccagcaggcgtccctgctgccacgcctgctccaccttggcggcatcgccgccggaaaggccgctgcggctgcgctgcgcggggtcgtattcctgactagtggcctgcatcacctgccacaggtgccgcatggcggcgcggctgtgcgcctcggtcaggcggctctcctccaaatcgctgcgcagcaccgcttctgccagcgtgatcttctggctgcgggcagcagccagcatctcttcacaggacaaaaatgccatggctcattcctccgtttcttccggctcgtccacgttcaggcaggtcaccttcagcagacccggcatcaccgccagctgccgctccagcgcgtgggggatgtgggagtcgcactccagcaccatcaccgcatagccgcccgcagcggcgcggaacacctgcatggacgcgatattgatgcgccgcagtgccagcgccatggtcacctcggcaatgcagccgggggtgtcctcgttgtggatgatgagggtgttgctgtcaccgccgaaatccgccgggacgccgtcgatctccgtgacgcggatgcgtccgccgcccaccgacgccgccttgagcgaaagctgccgcccggtgcggctggtcagggtgagcacggcggtgttggggtgggcagagcgcagctctaccgggtggatgctgaactgcatcccccgctgcgcggccagcgcaaagctgtccggcaggcgggggtcgtccgggcgcagacccagcagccctgccaccaatgcgcggtcggtgccgtgccccttgccggtggtggcaaagctgccgtacaggccaatgtctgcctgcgccggaacttcgcccagaagcttttgtgcggtatagccgatctttgccgcaccggcggtgtggctggaagagggtccgatcatcaccgggcccagaacatcaaataatcgcataggggacagccttcctttcctgagggttttcccacttttgcgcggcagctgctgccgcaaaacgcgcttttttcctgcttgaatggactaaaattgccaaaacggcacatttttatcaagtttattataccgcttttgctgcacttgtgctataataactttattaatgtttgaaaatgtccccaaaatggcgttctggctgctgccttgcagcgccgccccgccgccaagggaacaacacggagggtagatcctatgaaactggtaagcgtggaaactcctgaaaagagtgtctgcaaaatgaccttcagcgctacggctgaggaactggaggccgcctccaatgcggtctatgagcgcacccgcgccacttataccatcaagggcttccagaagggcgaggccgaccgcgcacagatcgaggctgaccgcggcgagcacaccttctggtacgatgccatcaacgacctgatggatcaggatgtgcctgctttgtacgaggctgctttgaaggaacacggctttgcgccggtggatgatcccagctacgatctggtaagcgtgaaaaaggacgagggttttgtggctaccgccaccgtggcgctgcagcccgagctgaaactgaccaagaccaccggctttaccacccagtgcgtcaccccggaggtgaccgacaaggagatcgacacggtgctggagcgccgccgcaactacgccgcagagctggtgccccacaagggccccgctgtaaagggcaatgtggtgcacatggactttgaaggccttctggacggtgtggcctttaagggcggcacggcaaaggatcagtcggtgcagctgggcagcggccgcatgatccccggtttcgaggacggcattctgggccacaaggcaggggacgagttcgagatcaacgtcaccttccccaagaactaccccaacaaggagctggccggtaagcctgtcgtgttcaagatcaagctgcatgacgtgtgcgtgcgtcagctgcccgccctgaacagcgattttgccaagaagatgggcaaggagaccatggaggagtaccgcgccttcgtgaagcagcagctgttcgacggccgccacggcggtgcgctgaaccacgccaaggatcagatccttggtcagctggccgatgccgcagagggcgagatccccagcattctggtggaaaacgcctaccagcagcagatgcaggtcatccagcagcagctgcagatgcagcgcatgagcctgaccacctatctgagccagatccacgagacccgcgagagctttactgccaaggtgcgtgccgccgcagaaaagaacacccgcgcccgcatggcactgctgcagatcgcacagcaggagaacctgctgcccaccaatgaggagatcgacaagcagctggctgagcgcgctgaaaagactaaaaagacggtggaagagatcaaggcaggcaccgatatcgctgctctgcgccgcaacgagggcatccgcaaggctgccgattgggtcatcgaccgctccaccatcgaggaaaaggtagagagcaagtaagcgctgacggtttggaatgcgcgccgcgctgctctgcgcatcaatagaggaaaaacaattttaaatttgagaaccgggaaaatctgcggattttcccggttcatttttcacagaaaggaatgcagttctcctttacgacctttcccgtgaaaatgcaatgccgggcggtccgcagaccgcccggcattgatctatttaagaataatacttccgctgattatgcgcagagcagcgcggcgcgcattcaaatcgtttttcaggtcagaaggttgaagcccatgatgaccacgcccagcaccaccagcacgacgccggtggcgcggttcagggtcttgggagtggccttgttggcaaacacggcggcaatgcgcgcccacagcagggtgaacaccacgcacaagccccataccagccaatcaggcgtgccgccgatcataaagtgggacaccgcaccggtcagggcggtaaaggtcatgatgaacacgctggtgcccacggcagttttcaactcgtagcccagcacgctggtgaggatgagcagcatcatcatgccgccgcccgcgccgataaagccgcagatgaagccgataagcacgccgcacaccaccgactgcaccgcacgcttttgcgcgctgaccccctgcatggcttccttggtggtcatgaccgggcgcaggatgaacttgacacccaacaagaaggtcatgaacaccgagaagccgcccatggtggcggagggcaccttgctggccacccagctgcccaccaccgtaaaggcaagcacacttgccatcatgatcaggccgtttttgatatccagattcttgtttttatggtaggtataggcagacaccgcactggccagcacatccgaggaaagggcaatgcccaccgccatgtaagggtccatgtgcagaaaggtgatgagcatggggctgatgaccgccgccgcgctcataccggcaaagccggtgccaaggccggcacccatgccggcaaaaaaggtgacaagcaccgtaaacagcaagtacattttatctattctcctttaagatctcgtccagatttttcccgatgacctccatggtgcggaaaaacgcctcccgggtgggagcgtccgtgttgtccagcaggcgggcaaaaaagcgctcctgcacctcgcgcccccgtgcgatgaccggctgcgccttttcggtgcacagcagctgggtcttgcggcggtcgcccgccacggcgcggcgctccagatacccctcctgcaccagacgatccacgttcaccgacacaaggttcgccttgatcttgcgaatctccacgatatcccgggcggtggtgcagtccgggttattggctaaaaacatcaggatatcaaaggcggtctggggcagcttgagttcctgacacagcggcttgcacatggcgctgtacgcctgtgcggtcttgaagctgatctctatggtagggttcatggaatactccttttgttcttatatggacagttcatttttgaagtattatagtgcagatgcagggagatgtcaagagaaaaagagaaccagcacgtcctgcggacgcgccggttctctttttcaatatgatgattgcgttcagaacagtgccacggcgaccagacgcaccagcagggcgcacagccatgccacggcgcactggttcaccaccatgatggttgcccacttgccgccaagctcccgcttgaccgaggccactgccgcgatgcagggggtgtacagcaggcagaacaccagcagcggtgcagcctgcgctggggtgagggctgcggtcagggcagcggtagagccgaagaggatgagcagcgaggacaccacgctctccttggccataaagccggagatgagggcggtggagatgcgccagtctgcaaagcccagcggggcaaacagcggggcgatatcgcccgcgatgcgcgccagaatgctggcctgcgggtcagcggtcagccgcagctgcaggtcaaagttctgcaggaaccagatgacgatggtagcggcaaagatgaccgtaaaggccttctgcaagaagtcccgggccttttcccacagcagctgcgccacgttcttcaggccgggcaggcggtagttgggcagctccatgacaaagggcacggcctcgcccttgaacacggtgctcttgagcagcagcgccgccagtacgcccaccagaatgccggtgaagtacagcagcaccatcacaagccctgcatattgggggaagaaggccgccgcaaacaggctgtaaatgggcagctttgccgagcagctcatgaacggcgtaagcagaatggtcattttgcggtcgcgctccgagggcagggtgcggcttgccatcacgccgggcacggtgcagccaaagccgatgagcatgggcacgatgctgcggccggaaaggccgatgcggcgcagcagcttatccatcacaaaggccacacgcgccatgtagccggtatcctccagcatggagaggaagaagaacagcaccacgatgatgggcagaaagctcagcacgctgcccacgccggtaaagataccgtcgatgaccagcgagtgcaccgccgcgttgacgttccagttggtcagggcggtgtccacaacgccggtcagggcgtcgatgcccatttccatgaggttctggaagaacaggccgatgacgttgaaggtgaggaagaacaccagacccatgatggcgataaacgccgggatggcagtgtacttgccggtaaggaacttatcgatgcggttggagcgcagctgctccttgctttcgtggggcttgaccaccgtctgcgccaccagctcctgaatgaaggagaagcgcatatccgcaatggcggcggcgcggtccagcccgcgctcctgctccatctgcacgatgatatgctcgatcatttctttttcgttggggtccagcttcagcgcttcctcaatgcgggggtcgccttccaccagcttggtggcggcgaaacgcaccgggatgcccgccgccttggcgtgatcctcgatgaggtgcagaatgccgtggatgcagcggtgcaccgcaccgccgtggtcatcctcgctgcaaaaatccatccgcccggggcgctcctgatactttgccacatggacggcgtggtccaccagctcgtccacgccctcgttcttggcggcggagatggggatgaccgggatgcccagcatcgcctccatcttgttgatgcgcaccgtgccgccgttgccgcgcatttcgtccatcatgttcagcgccagcaccatggggatatccagctccatcagctgcatggtcaggtagaggttgcgctcgatgttggtggcgtccacgatattgatgatgccggtaggcttttcgccgatgatgaactgtcgggtaacgatctcctcgctggaatagggggacatggagtagatgcccggcaggtcagtgacctcggtctccgggtgccccttgatggcaccgctcttgcggtccaccgtcacgcccggaaagttaccgacgtgctggttggaaccggtgagctggttgaacagggtggtcttaccgcagttctggttgcccgccagcgcaaaggtcagggtcttatcctccggcaggggatgctccccctccttggtgtggtacttgccgccctcaccaagacccgggtgctccaccatttttccgtccaccggggcgtgcaccgccggggtcttttcggtgggggtcacggtgatctgtgccgcgtcgtccagacgcagggtcagctcatagccgtggatgcgcagctccatggggtcgcccatgggcgccagctttaccagcgtgacctctgctccggggatcagacccatatccagaaaatgctgccgcagtgcgcctgcaccgcccacagcatccactatggcgcttttgccgatctgtaactcttttaacgtcatatccgttgccttcttttatatgtactgttcttatgtgttagtctgtgttaacaaatgtagtataggctaactgacagcggatgtcaatagagaatatagacataaaaaagcaccgcacactctcaggcgagaatatgcggtgctttggttttataagttacttcacggtgtggtagccatcggggttgttcttctgccagttccagctgtcggcgcacatctcctcgatgccgtactcagccacccagcccagctcgttcttggccttggtggggtcggcgtagcactcggcgatatcaccggggcggcgcgggtcgatgacgtaggggatctccttgccgcaggccttggagaaggcatggatgacgtccagcacgctgtaacccttgccggtgcccagattgcagatgaagagaccgcagccggtctccagcttgcggatggcgcacacatggccccgggccagatccacaacgtggatgtagtcacgcacaccggtgccgtccggggtggggtagtcgttgccaaagacgtgcaccttttccagcttgcccacagccaccttggcaatgtagggcatcaggttgttggggatgccgttggggtcctcgccgatcaggccgctcttgtgggcgccgatggggttgaagtagcgcagcagcgccacattcaggctggggtcagccttgcagacgtcctgcaggatgcgctcggtgaaggccttggtggtgccgtaggggttggtggtagcgcccacagggaagtcctcggtgatgggcacactggcggggtcgccgtagacggtagcagaggagctgaacacgaagttatggcaatcatgatggcgcatcacgtccagaatgaccagcgtgcagttgaggttattgtagtagtactcgatgggcttggacacgctctcgcccacagccttgtaggctgcaaactggatgacggcggtaatgtccgggcactcggagaagatcttctccacgtcctcgcggcgggtcatgtctgccttgtagaagcggaaatccttgccggtgatctgcttgacccggtccagaaccacaggagaagcgttataataattatctgccaccacgatatcgtagccagcgttcaacagttcgatgcaggtgtggctgccgatgtagccggcaccgccggaaaccaaaattgccatagccgagtacctctctcacatagtatttcttgctttttctctttgcgccgggcgctgcccggtctgcttaaagcataccgctttttgccgccgactgcaaggggcgctttctttattcagatatatttttgttgcatcttcgcgcaacgcacttttgattgacagagatttttcgcacttttcacatggagagaatgcgccgtttgtgcaaaacatagaaatggagagggaggatacccctttctcagtcacgcaaaaaacgcctgccgaagcagacgtttttgcatggtgtatcatttttaaagctttccgcactgcttgccggtgaagaaccgcagggtggtggtggcgcggaacaccttgcctgcccgcagcaccgtggaggggaactccgggtgagaggggctgcacggatagtgctgggtctccaaggcaaagccgccgtacttccgcagcggctcgccgcccttgcccggggcggggcagtcctgcaaaaagttgccggtgtacagctggatgcccggctgggtggtgtacagcttcatgctgatgccggtcttatcactggtcgcccatgcgcagatgctctggctggagccgcgtgcgcggtcgatgacatagcagtggtcgtagccgccgcccaccatggtggtctgggagaagccggtgtcgatctccttgccgatggtcttaccggcagtaaaatccatgggggtgttcaccacgggcaggatgttgccggtggggcaggtggtattgttgccctccagatagcgggaggcgtagatgcgcagcttctggttcagcacgtcgccgccgccgtccagattgaagtagctgtggttggtcaggtttacgatcgtgtcagcgtccgaggacacacggtagtccatgcggaaggtgttgtcgtcagtgagggtatagcgcaccgcgatcttcagggtgccgggaaagccgtcctcgccgtcagggcttacagcctccatcagcagggtgtcgccgaagtacttcacctcatagattttccgggaaaaacagccgtgcagatggtgctcgccgcagtttttttccagctgataggtcttgccgcccaaggtaaagacggcgttttcgatgcggttggcgtagcgccccacaaaggcaccgcagcaggtgctgccggacgaggtgaagtcgttttcgtaatctgccatggtgtcgtgacccagcaccacatccaccgggccgtttttggccgggacgatgatatttttgatcacgcagccgtaatccagcacactgacggacataccgccggggttcgagaggatgtactcggtaacattagcgccctctttggtcacaccgaagggcttggaacggatctgtgccattgggcctcgcctcctaaagcttttttcggaaatgcaaaaggggcagactgcccccttttgcatcttgtctgtatttatgattatatcacagttttacagttttgtgttggaatccttttagaattaccatccaatttttgcggcgattttttgttagaatcatcgaaagtgcctacaataccaaaaagcgccccgcacttccgatggaaatgcggggcgctttggtgatacaggctgtaagccttatgcttccggctgaggctgtgccgcagaggactgggcggcaatgaactcggcggcatcgtccgggatgtcgtccaaatcctcatcgctgccgatatccacgttgagcggcggtttcttgaacaggatatcgtacaggataggcacgatatacagggtcatcagggtggcgtagctcaggccgcagatgatgacgatggccatgccgctcatcagctggcttgccatatcgttgctgaacaccatttgcagcattgccagcacggtggtcagggtggtcatcagaatgggacgcatacgggtcttgccggtggccaccagtgcggcgcggcgctccatgccgcccatgcgcagctggttggcgtagtccacgaacacgatgccgttgttgacgaccgtacccatcagcacgatgaagcccatcatggagatcatggtcagctgctggccggtgagcagcagacccagcagaccgccggtaaaggccagcggcacggtaaacagcacgatgaagggggacagcaggctctggaactgtgccaccatgacaaggtagacaaagggcagggccagggccatccactggatcatctcgtcggtcatatagttgacgctgtcgctctcgccgcccatggagaaggagcagccctccggcatctcatcggtgagggcaaaagcatccagcgcctttttcacggcacgggcctgcaccgtggtgttgtagcccggggcagtctcggcagtgacggtgacgaactggttccggttctcgctggtgatggagtccggtgcggtgccggtggtccagctggcgatatccgacagcttgcaggtgccggtagcggtggtgccgtcggcggacatgacggtggtctcaaaggtcatgtccatcatgttttccttggtcagcgggtccagattgttgctgatctgcacatccatggtggtgccgtccacggtaacaggggtctgtgccgtggtggtggtggtcagctttgccgcgatctgctggtacacctgcgcaacggtcaggccgttggcgcgcaccttgtcgcggtccacctgcaggatgatggtggaatcgcccgcgcccagaccgttggtggcgttctggaagccctcggtgctgttcacgatgtctaccaccttctcggacagggaggtcagggtctcggcgtcagtgccgtagatcttgatggtcagaccggtggacagctgactggtcaggtcatcggtcatgccgtactgctggacggtggcggtgcagtccgcaacgccggccacagcgtcctccatggccttgcaggcggcatcgatcttggaagaagaaagctcctcgttgagcttgacgttgatcttatacttgccgtagccgttggcggcgttcagcaggtcggtgatggtggagggcaggccaaggttggagacatccatgcccgccacagtgttgtcgggggtaatgcctacctcctccacgccgtccacggccatcacagcctgcaccaccttaccggccacatcgtaggactcgtccttcgagagggtatcggtggtggaaagggtgatcatggcctcgttgctggtgctggtgggcagcagcacgatgcccatggagaccacccgccagcagcagaacaccagcagcagcacggcggctgccagcggcacaaagcgcttctgcaaagccttttccagactgcggccgtaggcgttctggatcttatcgaaccatgccagctttttgggctgggcattcttcagcacggtagccgaggcagcaggcaccacagtcagtgccacgatgagagaagccatcaggcagtagccgatgcacagggacatgggacccatcaggttgcggatgaggctggcagagaacactgccggcaggaacacacacaccgaggtaagggtagaggccacgaccgacatacccacctgacgtgcaccctgcaccgcagcgcgggcggcgggcacgccgcggccgcgcagacggtagatgttctcgatgacaacgacagagttatccaccagcataccgatgcccagcgacaggcctgccagcgtcatgacgttcaggtcaagacccgtgaagtacatcagcaccacggcaaacagcaccgacagggggatactgacgccgaccaccagcgtgggcttgacgtccttcaggaagatggccagcacgacgatggccagtgcggcacccaccagcatactggtgaggatgctcttgatgaggatgctgatgtagttgccctgattggacagcaccacaacgtgcagaccctcgtactgggcttccagctccttgaaagcgtccagacagttggcagatacgtcacctgcgctggaactgtcgtccttgtaaattttcagcaccgaagcctgctcgccgttcaggcgggtgtagctgtcagcggcgttgtcgatgatctccacgtctgccacatcggaaaggcgcacgtcgccgtagccctccacatggagcagcagtgcaccgcggatatcgtccacgctgtcgtattcctcgcccaccttcagcagccacgactcgccgctttcgtccttgacgtaaccggcaggcatggagaagttctgggcgtagatgagggtggcaagggtcttgatatccagctgcttggttacatcggcgctggcaagcgccttttccttggcggcctcgtactgggtcttggcctcgctgagctgcttttcgtactcattcagctgctcgcgggcttcggtaaactgcatataggcgaccatctgctgctgggtaaagttgcccagcgctttggagaactcgctcatcatgccgggcacgttgtccatggccttgatggtatcttccagcgtcttatagatgacgttcaggctgtcctgcaattgcagctcgtctgccagatccgcagcgccctcgccctgcgtaccggtctcggtgttgatgcggttctgcagggtctgcaacgcagaggagagcttatcggtgatatcccgcagctcggacacgatctcgatcagggagtcgatatcccgcataccggtgctgttgaacttgtccagcacccgctgcaaaccggcctgcacctcaatgagggcctgctgcacctcgggctccttgaccacggcgatcaggttgttgacgctttgcagcagtgcctcggcctgcttgcgcaccacttctacggcgcttccgacctcagagctcagggagcccatgaccgtgttggacacggtattgccgaagtttttgaactgcttatcgtattctgcgcggccggccttgatcttggcctcggcctcctccaactgtgtgtgcgccacttccagctgagtgtcgataagctccatcagcttttcgttgatggcgtccaccttttcctgattcagctgcacctgcaccagctgctccacaaggccgctggaggatacgctggacacgccgcccttgcgctggacgtagggagtcatggtgttcttgataaaatcagaaaggtcgtacaccgaactgccctcgcggctgacagccacggtcataaaggcgttcatgttcatgctgtactgtatcacagagggagtcagcaccgtctccggcaggtcgctcttggcctgatccagcttgttggacacctgcaccagtgcgctgtccatatccgtgtcatccacgaactgcatcagcagcaggctgtagttttcagccgaggtggcggtgatctttgaaacacccggcaccgtaagcgcgttttgcagcacgtccgagacctcggtctccacacgctccgggctggcaccgggatacacggtgaccaccatcagatacggtgtgctgacattcggcagcaggtttgttttcatcttggtgatcgacacaaagccgagcatcagcaccatgatgactgcaaccagcaccgtaaatggttttttgacactgaatttttccatcttctcctaccgtttctctgcagcaccgcccggcgcaacagttcctccctctttgggggcaatgggttcctaacattcctattatacacgcaaggcgcgcgctttcaatagaggtgcggcgaatcttttgcgaaagttctgtcaaaatctgcgaaacgcacaactttgccgccccaaaaccggcattctgtccgctttcctcccctctgccgccggacaaaatttcgacaccttttcccatactgcatacggttgagcagggggaatcattgcaggggagggaaaattcaggggatataaagacttttctttttgcatagaaatgtgcttttgattatggtatactaacagcagactgaaaaagcgccccttgaaaggggcttatccgatacaaaaacgaggaacactatgaaaaaagtcatttcggtccgtttcaaggaaaacggcaaaagctattattttgatcccggtgatgctgtcatccacaccggggagtatgtgatcgtggagactgcccgcggcgtggagtgcggcgaggtggtgcagggcgtgctggagctggcggatgccgccgtacccaaggcgctgaaacccatcacccgtatggccgacagcgtggatatccgccggatgcgccagaaccgcgaggacgaaaagcgcgcctaccgcacctgtcaggagtgcatcgcccgccacgggctggagatgaagctggtggaggccgagtacacgctggaccgctccaagatcatgttctacttcaccgctgacgggcgggtggacttccgggaactggtcaaggatctggccggcatcttccacacccgcatcgagctgcgccagatcggcgtgcgcgacgagagcaagatgatcggcggtctgggcatctgcggccagcccttctgctgcagccgctttttgaaggatttccagcccgtttccatcaagatggccaaggagcagggcctttcgctgaaccccaccaagatcagcggtgcctgcggtcgcctgatgtgctgccttgcctacgaggagagcgcctacgagtacctgaacagcatcatgcccatggtgggcagcacggtgcgcaccccggacggtctgggcaccgtgctggaggtgaacccggtatccggctacctgcgggtgcgctgcggcaccgagagccttgcgccccggtactacaaggtgggtgtgtgcgagtatgtgagcggcggcaagcgcccgccccgccgtcccgacccggacgatgattactccggcgtgcgcaaccccgccccggtggtggcaagctccgacgacgaaaagcgccccgcctgcccccgccgccgcacgaatgagaaagaatgagcgtccgggtagttagtatcacaaaactaaccagacttcgtgattttcgctaaaaatctccggcaattttggctataagttaggccgtgcttttgtgcaaccccacaaaatattttattttgttgttgtggcagtacggttagtcttgccttttccggcctgctttgttagaatgcagacaaggatacaaattccggggggcgtgcgtggccgtgccaaggtacgtttcttcataattacatcggcacgggataaaaaaggagagtttattatggcacacaaggtttctgacgcatgtgttggctgcggcgcttgcgagggcgcttgcccggttggcgctatcaccatcgagaacggcgctgcagttgtgaacgctgattcctgcatcgattgcggtgcttgcgagggtgcttgccccactggtgcaatcgctgctgaataatcagtagtttttgctgaaaacgcatcaaaaaggactgctgcacactgtgcagcagtccttttttgtggtatcataaagtaaattcatgaaaaacgcagttcggcgcgtccgcatcaaaaaaaagcgctgtgcacacaacactg

SEQ ID NO: 13872 - DNA, 2799 bp, Unknown
  gut microbiota DNA sequence
taccctgcattttttggaagggaaacggcacactgtctatggaacattctacggaagttttgtataatagaactatggtctactgcaccccggagcaccggttcggctcggatgcgctgctgctggcacgcttctgtgagccgaagcgcagccagaaagccgcagacctgtgctccggctgcggcatcgtggcgctggaatggcacgaccgggggcaccgcggcccctgcaccgcgctggaattgcagcccgagggcagcgccctgctggcggcagcggtggaagagcagcagctcacccacatcacccccgcctgtgccgacctgcgcacatggcggcaggacgaggggcaatttgacgtgtgcgcgtgcaatcccccttattttaccgaggggccgcagagtaaaaacgccgcccatgcccttgcccggcacgaaaacacctgcgcgttagaggatgtctgtgcctgcggcttccgtcttttgaaggacggcgggcggctggcgctgtgccaccgccccgagcggctggctgaggtgctggctgtgctgcgcgcccaccggctggaacccaagcggctggcctttgtgaagaacgccccggaaaatgccccgtggctgttccttgtggaagcccagaagaaccgtaaaaccggcctgcgggtggagccggacgtgctcatccgcgccggtgcggcgctgtacggacgataaattcaggaggtaattatggcaggaactctctacatcgtggcgacccccatcggcaatctggaggatatgccgccccgggtggctgccacctttggcgcggccgattttatcgccgccgaggacacccgtgtgaccatgaagctgctgaattatctggggctgaaaaagcccatggtcagctactacgagcacgctttgcagaagggcgaagccattttgcagcgcatcgaggcaggggagagctgcgccttgtgcagtgacgccggaatgccctgcgtgtctgacccgggcgaggtcatcgtgcgggacgcactggcgcggggcatcaaggtggtacccattccggcagcttccgcctgcgttaccgcgctggcggtctccgggcaggacacctcccgctgggtgttcgagggctttctgccggtgaaccgcaagcagaaaaaggagcgtctggccgagcttttgcaggaaaagcgcaccgtcatcttttacgaagcgccccacaagctgcgcaccacgctggacgatctgaccgccgcctttggcgcagagcgcagcattaccctgtgccgggagctgaccaagctccacgaggagatctggaaaaccaccttgggcgaagccgtggagcactaccgcgccgccgagccccggggcgagtatgtgctggtgatggcgggtgcgcccgccggtgccgccgaggaagaggagctgaccctggaacaggcggcacagcgcgcttttgcgctgaccattgagggtttcagcgcttctgccgccgccaaggctgctgcgcagggcacggcctattccaagagcgaagtgtacaagcagctgctgctgttgcagcaggctgccgaatgagtgtataggaggatatttttccgtgacaaaactactggtcctgagcgacagccacggtgcgcgtggcgccattgagcgcattttgaacaaagagcagaacaacgtggacgccgtgatctttttgggggacggtctgcgggatctggaacagacgctggcctttttcccccatctgcgggtgtattccgtggccggtaactgcgattacggtgcgctggagccgctggacggcttggcaggcttcgatcagacggtggttttctatacgcatggacatatgtacggtgtaaaatacgatctggatacgctggcagacgctgccgccgcccggggcgcagaggtggcgctgttcggtcactcccacattccccacgcggagcagcggggcaaggtgtttttgttcaaccccggctcctgcgggcgctgctacaccggcccggacacctacggtctgttaacgctggaaaacggcgcagtgaccgcctatgagcacaaagaggtacccaagcaatgagcatcaacgaggtgcgctatctgccggaatgcggcagcaccaacgcctatgtaaaggaacattttgaggagttcggcccggtggcggcggtgtataccgaaaaccagaccgccgggcgcgggcggcttggccgcagctgggtaaacgccgagggcaaggcgctgtactacacggtcgccatcaaggagccgctggcgcagcccgccaccctgccgctgctggcaagccttgcggtgcgccgccaattgcagctgcgctacggcgtggactgccagatcaagtggcccaacgaccttttgctgaacggcaaaaagctggtgggcatcctgtgcgagagcgtaagctacggctaccagcagcaagggcgcggcattttgtgcggcatcggcatcaaccttgcccagccgcagagctattttgacgccgccgacctgccccacggcacctcgctggcactgcagggcgctgcggtggatcttgccaccgaccccgcatggctggccgaggggctgacagatttcggctttgaccgcaatctgtacacctttgcccgggacggctttgcgcccttccgggaggaatacaaagccgcctgtgtcaatctgggccgccgggtcacctttcacctgccggacggcagtcagggcgcaggcgaagccgtggatgtggacgccgaagggcgtttagtggtgcgcaccgatgccggtg

SEQ ID NO: 13873 - DNA, 4737 bp, Unknown
  gut microbiota DNA sequence
tggcagcaagcaccgctatggtatggctgcggattggcggcttgtagaccgcagcatcaatcctgtggccttgggtatcatcgccgcccagtatttcaaggcggtgggcatctactggtatgacggctgcgctatcgtgcacactgacacccgcgatgcaaaggcaacgtggctgtgcgatgccccgaagcactaccccagcaccacctaccagaagttcattctgccgaccatccgccggggctgcaccggggatgcaaaccgggcggccacgaagatgctccagcggctgctggggctgacctcggacggcattttcggcgagggcacagagaacgctctgctgaaagcacaggaggcgcatgggctggctgtggacggcatctgcggccccgccagctggaaggccatttccggggcttccaagtacctgtgaaacatctgatataaccaacacgacaaaacggcgcaggggtggctccccgcgccgctgatacttataggaggcaatatcatggaagctatgctgaactttattcccgctcccgccgccatcgtcctgatgctggcgggctttatcgctttggcagtcggtggcatccggctgggctacaaggccaccgtcaaggatctggcgctggagctggtcgaaaaagccgaacggtccatcatgggcagcgggcagggtgccaaaaagaagaagcaggtgttcgcggctctccgcgccaagtgcccggcggctatccgctgggctatcaccgacgaggtgcttgatgccgtcatcgaacacgcctttgatgttatgaccgcagcacttggtaaaaagtcttgactgctacatgagtgccgtgtaaaatagaggcacttgaaaagcttcggcttttgtagagagcggcccggcatggtccactcttgattttatatttggctacctcggtagcgcgcaaaaatccccctgcattgaccttcaggccagtgtagggggattttttgtttgttagaacttcatctgtgcagcgtcttcaacactcacgtcgtcgaaacaccgggtcagttcatcaaggactttgcgctgtgttttctcactcaaaccggcgttgcgcatcgccatgacacagtagccgatgcaggctgcgtttgaccacggtccattcagtgacaggagcatttcttccatatcgattacctccgaagatctccattgtatacgcgaaccagcacccagtcggacagcggtttgacgttcccggtccagtcccggagagcttcatctgtgccgcaggcctcacagatgtacacgcccttggcgtggcggctcagtgctccgtgggtcagtttgtccggcatcctctcgccgcagcgggggcacagcggccagccctgctgctggtcatagagcatcttttcgatagctttttcgtccgtcattgtacttcctccttaaacatctcggctaaccgagtgatatgcaaaccagtgaccgcgccgccggaatagatagaaccaattcgtgaactcctgccctgtgcagtcataggggctgttgtaactcttcaaataatgatggttaagaaaccagttggtagcgtccatctcgtgcgcctcgtccagcttatcgggcagctgaacaagctccagacggccgtcatagtcggcgctgataatgcgcacattggaaacggggcggttattgtaggcccggatctccatcttgacggttgcggccaagttcttcacagcggctttcttttcggcagaggctgaaatatcgtgctgcatgaacatcaggagtgcatacgcatcccgcaatctctcattatcggtaatgctgaacatggtcaaatcctccttttgtaatttggatgcgttgaaagttcatccatccgctccagcgcaactatccgtcctttcggattcatcagacggaaatagcggagaagttgctgttcttccggcgaaaggctttcgtcgtaaattccggtttctaaccaatgtgcatcaacaccgagcgcatctgcaagccggtgaattgttgagggctttgggctctcttcaccacgctcatatcgcccgacgagagaacccgaaatttccaacttctctccaagttctgccactgaaagcccttgccgctttcgcactgttcggattctgttgccgaggctttctgttataccaaaagcaggaagaaacgaactgactggtaaatccaaggcttctgcgattttttgtaaggttgcgattctgggaatttgctttccactctcatattttcggatgttggcagcatcgattccacaacgttcacctaactcttcttgcgtaaatcctcgaagctgacgagcggttttgatttgttctcccatcgacataattatgcgcctccttcaatgtccggggactgctctctcaataaatccttgtacggcctgcgaagttgtgtgcctgcccaattccagtgctgctctgcatacaccgtcaggctttcggcatactttgcagcggagcgagcatcaaagaacaccttgctgccgacctcggccatcttgtagtgatagggagtattgaagcctcccggattcttcccgaccagcttcacctcggtgtacccacctttcagaaaccccacaactgtggcctcgcagacacagtattcattcaatggtgccgcgcgctctggaacgtagtagaggtgttcacatacatggaacatcgtgtcgccgatttccggctttctttccacacgcattctgcgctcctcccttacttcatgttctggcgttcccaagcgaccaagcggcaaaattcctcgcgggacatggattccggcttgctggtcttgatgtagtcctgctggccgaagatctccagctggtcgatgtcgtcaggcgactgggtgataatctttgccggccaatcgcccacgccggggacttcaatgcgacgcagatacaggttactgtcaaagtaccaatcactcttgatgtaccgctcttcggcatcggttccctcgatggcctcaatgtacttgccgagcgcgccgaagacttccagtctggttggtgctttgtcgaagtcggtcacatcaaagagtttgatataggagattcggccgcgttcaacggcaagctcctcgatggtgccggagtatttgtaaagtttcattgtcatatcctccaaatgcccgtatagccagatagcgcagcttttcggtttttaggcggcggtattttcactctcggcctctgtcaaaaatgcagaggtgagatgcaaccgggcggtcttgaattccgggcctctcatgcccagacgctttgtaagcacccgcatcatcaaatcgtgcttctgctgctgggtgtacccgctgatggacttgaagtgaaggttgtcgtggtcacaattgatagcccatgcgctcattgccaagcagaactgaacgtatgctttgatgcgcccggcgtgggtggttccgttgaacagtcggaactccacggtgccctttgtgaagaatgcatggaggttgattccgtgataccgggtgctgttgtagtgggaagaatccacgcctccatcatatccgtcattcaccacgctgtaccagatgcgctctgcatcgttccggcttgcccggccgttcttcttcatttcacggaacagtgcagggttgattttgtggcaccagtggtctgcgcggttgccgatctgcagggcttcgtagaacagatcctgccgcccggtggcgaagttcagcagccggcagaggctttcgggcgtgtggttcgcaccgtcaacgtggacgtggataccacaggagctgttcgccatggcacccttcttgaccagtgcccggatgacctcttgcaggtcggtgatgtcctcatactggagaatcggggtcacgacctcgcagcggtaggtatcgtctgcctctacgattgcgccgcctctgcgccgccggggagtgatggaaccgtctctcatgcacttccatacgcggcctttgctgtccttggcctcgtaggtctggtaggtaccacctgcaaagtggataccgccgacaccgaagtagttggcgatgacggaggcggctgttccgcgggaaacgcccgtcatttcaatctcaacgccgaagttctgactctgaatcgtgaccatctttgcgccctccccttagtgcagctgtgcagcgtgcttgtggtaggtgacggtgtagcggccaccgtgcttgacgaccttgatatcgtccatcttcacgcgccggacaccgaacttctcgtggatgtactttttgaccatcggagcggcctttgtggtcacatccaccgcactgtcattgctgcggcggctcttgtagcggtcaaaccgcttctcctcggcggcgtttgcttcctcctctgtgccgtagaatccatcctgtgcgcggttgttcagacggtagaacttcttgctgctgatgacctccagacgctcattccagacggtgctccagcggtcttcctgattgggcttgatgtcgtccttgacccggccgacaatcagctccacgccctcagtaccgaggtagttgttgaacgtggtgagcagcacccggatgatctcggtgccgttggtgaggtcgatgtgagcaacctcgccctggcttccgcccatcgttccggcgttgatgtagtagccccgtgccatgtagctgctggctgcggcggtgaactcacggttaatgtcaatgaacttcatgct

SEQ ID NO: 13874 - DNA, 4328 bp, Unknown
  gut microbiota DNA sequence
gaagaaaacaagaagacccggcggtgggcggaagccatcaaagccagagtacagtgcagccaagaacttaacacagcagatgaaagcagctactgaactttatacggaaaaaatgagcctgcaagccattgcagacgccctgtccctcaaccccatcaaggctcggaagttgctcatcacagccggggtctacaagtcggacacggcaaagctcgtccagcagacgttcggttctttcagaagtacgcagagttattctgctgctgtcacctccaccatgtcggctttgcagttgtcccgtccctctgtgacctcttatctgccgtatgagaaaggcgtgtacttcccggaggaagctgaagcggcgaatatcagtgccggggcagagaggcagcgacactaccgagctgtggctgcgctgaagaagaacccttgcgaagagaacctctggaagtgcgtggtggcttttcggggatacaagttcaagacgatgtccggcttgccctttacatatacgctgaaaaagggcaggggagatgaattcaccaaggagctgtggatcgaccgcagagaggacagcaagagtcttgcgtggagctccgtgatgctggcgtatcacaatatcggtaaaatcggagaggtagtggacagacccaaggctctgggagatatccggggtgtgtcgtatatctatgggctgttctaccgatttggcctgatcgacgtgccggacaaggctaaggagaagatggcgaagcaataagaaaacgagacatattttgttttaagatggaatgtgatataataaaactggcggtttaccgtactacatgaaaagggcaggtgaatgtgctaatgtacatcatttgtcaagattcaatcctttcatcagctattgaggcagttgttgaggcagtaagcctgttggggttgaagcaagaaaagaacagaatcaataagcggattcagtcattgcttcatattgctgatgatctggcaccggattctgtggagtatcagtgcgtttatgaaagaattctcgaattggaaaggatgcgagaactgatcagacgcattagaaggactaagtgtgcacagatttatgcgcaattgcatatgctatgggttaatagagcccaaaaggccagtcgcgcgactgcgggtttgactactgatccgatgagcatcgcaatgcccattcctcccacgtttgaggctaccttgagtagtttcggacgtgggagggatttggatgccctcgcatgctgaaaaaaatcaaacagaaatcgaaaactactatcatattatagacccggagggaaggctgtctgagaatgagaaggctgaagaagaacgcaaggtgttagagaatatgcctgcttgcttcccggcagcactacgatatgtgatgacacgcttcggatttacgcaagaggctctggcctttgcatcaaaggtgtcggagtcaacgatcggtcgctacagaaatggaaaggttgaaagtttttctgagaaaaacgtggttgcactatgcgttgctatgcaccttcctccatggctttcgtttgcgctcatagcaaaagcgggttttagcttggctgcaaccagagaacagctagcacatttgatgattcttaactgtatgtatatgaggtcaattgatgaggtgaacgagtacttaagggaaagaggaaatgcttcactgtcccgagagacggcacaggattgtcgagcttcttgagattctgaacctaaaatgatgagccgtgtgttcaactccctgccggagaaggatacacggctcatttgcactgtttgaggacaaggacaagaagagccagatgcgaatctgcacacttggcttatcgggagaccgtgtgagccagtttaaaactgaattgctgcctgtttggtgctgctcagaacgcgtagtaagccggggtggacttcaaaaaatctgaaattatttcggattttaggagtctattccggctcttttgcgtttataggatcggaattggcagattacacaattttccggcttatttctcgtcgcttcgatgaaaagcggctgctcctgtttacaaatagagttttggccgctatattacagatataataatagcctaaaaggctctattgaaaagataataatttgtaacgtggaggtgtattaccagacaaagatagtcatgttgttcagttaaaaaaatccttctgaatgacgtctcagcaagagacattacataggtttttagtagagtgccgcgattgttggaggcagtcagcgcacaattattgaggagttataactaaacggtccttaattcaatactaaaacactactgtaaggttgaagtgcgtctacttgctgataagactataaaatgtctggctaatacacgtccggtcaatgagtacggaaacggaaatacataagaccggagtaaatttagaaacaagtaatgcgtaagcaacttgaaatctgaatttgctccggtctttttttattaaaattttcagcgaaggaggtgaaccgaggtggcatccgctgtacataagaataccgagaccaaagcggcatccgtcaatgtcaactcggtttgccgccagaatactgctgagcaggggatggctgcgccagatgagtttatggcagaggttcagtggtccatggcaatgcggaagatgattgcaaaacttgagttcggagacgctctaaagctgctgatgaacgaccgggatatgtctgtggaacagatggagtcagagtctgggctctctgtatctacggtaaagcggcttcgtgcaggacaggatgcaagtgtggagcagatcgttgccatctcggtggcactgcaccttccgccacctgtaagcggtgatttattgaggatgtgcggaatcacgctggatttcaacaatcaaaagaatactgtctatcagatgattctgacggagtattacaaagagggcatcgaacaagtcaatgtctgccttgcagcatgtggatgtgcgccactcaaaactgcctgttaatgcggacacaacagaatacctatgaggcgattggaccataaaacggtctggtcgcctctttttttttgaaattttttctgaggtaagggctcaagaagtgagccctaaacggtaataaaacggcgcagtaaggctgcataagagaatctgacatgacggtactttttataaaagcacggaataacgatgctttgtgtgctgctttttagagctcatctgatgaactggtgatttgaggtgttctcggttatcatgtagtcagttcaagggacgaacccccaagaaggcaagttctaagaacaaaaataatatcgtaaggcccgattctagagagggttaaggataccataacggagttttaccagccggcagacgctgtctgctgcggtagaacgaccggtctatgggtgtacctcccatctctggaattgggcctttttgcgttttgcaggctggttcagtgcatggcgtgaccccttctatccagtctccgtcatcggtatccttcccctccctgagtccgggggaaaggacacgaaaatgactgacgtgatgaactgcgtagacaagctgcgggagaagaagatctccggctacaagcagcgcatggctgtgaacccctgcggtgtttatcgctagccttccaaattttcgacttttcacgacttatcgagaatttggaggttacacatgagtttcaataatggtaatgaacgtcgcaagctgaacgcaaagtgggagcaactccgtgtgcagtaccgcgaagccggaatgagcgaagaggcaattcaggtgatgtatgagtttgatctgggcgtcctgaacagtgaacgcgcctatgatgccaacacggtggcagtctgtgatggcgaagatgacgttgacgcaaggaaagcagctgatcttaagcaatatgaggctgcgatcacggtaacggatacctaccgcgaaaccaagagccgctttgcatggatcggcgaaatcgagaatgagaggctgctggctgctcttgaaagcttatcggaacttgatctcaaaatccttacgctctatgtctatgccgggtacaccgagtccgagattgcaagtgccttggaatccaaaaggattacaattcataagcgaatcgagcgaatgactatgtttttgaagaacttttgaactattttcttttccgggtaacaatttgccccttctcgatggctcgtaagtgaagggacaatttcccaagcggcatctgccgcagggcaaagtatccgacctcgcgctccttgaaaacagaatagttc

SEQ ID NO: 13875 - DNA, 747 bp, Unknown
  gut microbiota DNA sequence
tataaaattcaatgaaatgtattggaggaaaattaaaatgtctgcatttgataacgcaacccttatgatcactggtggtactggttctttcggttctaccgttctgaagcacttcttggattccgacctgaaggagatccgtatcttctctcgtgacgagaagaagcaggacgatatgcgccatgagcttcaggccaagcatccggagaacgccaagaaggtcaagttctacatcggtgatgtccgcaatcctcagtccatccgtgacgcaatgcccggtgttgactacatcttccatgccgccgctctgaagcaggttccttcctgcgagttcttccccatgcaggccgtccagaccaacatcatcggtactgataatatgttgcacgccgccattgatgccggtgtcaagcgtgtcgtctgcctgtccaccgataaagcagcctaccccatcaacgctatgggcatctccaaggccatgatggagcacgtcatctacgccaatgcccgtgtggctgctgagcgtggcggcaccaccatctgctgcacccgttacggcaacgtcatgtgcagccgtggctctgtcatccctctgttcatcgaccagatcaaggctggcaatcccatcaccatcaccgatcccaacatgactcgctttctgatgaacctggacgaggctgtggatctggtcttgttcgctttccaacatgcaaatcccggtgatttgttcatccagaagtctgatgc

SEQ ID NO: 13876 - DNA, 16213 bp, Unknown
  gut microbiota DNA sequence
atctgcaaaactctgcctcacaaagacatcttccagatggagctccggcttggtgaacagttctactgagcggaataagccgctcatgcgccagaaatcctgatcttccagccagctgccggaggagaaacggtacacctgcaccgtcagggtattttcgccggggtggacggcggcggtcatgtcaaattcagcgggagtgaaggtatcctcggtgtagccgatgtaaacgccgttgcaccagacggcggcggcactgtcggcaccgttcagacgcaggtagcagcttgcccagctttccggcagggtgaaactacgctggtactctccaatggggttataatcctgcggaatctggccggggtgcagcttttcgtggccgtcccacgggtactgggtgttgacgtaatggggcgtgccgtagggctggccgggcttttgcaggctctgcatctggataaagccgggcacagtcagggtatcccagtccgtaaagggtgcggtcaggttttccgcatagcgaaagttccactcgccatccaagccgacggtcagggacagttcggggcttgtctggtccgcaaaatgggcgtggaagggcaggcggttctgctggaaaatttccgggtcggccagaagcgccggggtaatgggatgattcaaaggcatacatatcacctcgcagcattttctgcttttattatagcacaggatataagaaaaacagccgcacaaaacgactgtttttctggagagaaacggcatcagtccgcttcgtcaaggatctcggtgtccagttctgtgtgtcccttggggatgcggtacttcacggcgggcagatggacgttggtaaaatacaggctggtgttggggtcgcagccgatgaccactgcttctcccctgccgcgcacggtgcagcgcagggtgtcgcaatgggcttcggcggtatcgttttccacgctttcggcgtagcccggtgcaaaattgggcacggcaaaaccgcagtcgtaggcttcgcagtcgaaactgctgtcaatctcgtgatggcggcggtggccggtggccgtgggggtgatggtagtggtcacctcaatgccggggaagggcgaccactgcgcagtcacagccccggcttcaatttcccacgttttgctcaccttgcgcacaaacacgttatcgtcgatgacaaaggccagcatactgtccggcgcggcctgattgagcacctcccggctgcgggaggcgcagaagccaaagcgggtatcgtaggcaaattttgcgtacttttccgggaactgtccgtggccgtgcccctcgttgacaccggcggcataggccgttacccgccccgcccggcgctgcaccagcatattggcgtatggcatgggcttgagccgctccaatgcgggcatgggcgcggcctcggcagaccagaagggatggtcatccggcaaagcaagcaacaaaaagctcttcatgccccagtaggggctgccgggggcgttgtaccgctcggccatgtacatctgcgggtagcagtagccgatggtcaggatgccgtcccggtcgaacattttctgccccagccaccagttgaagttgcggacgatgagccctttcatcaccggcaggggcagcggttccagccctgcccagatgcaggccgcccagaagctgttctgggcaaagcggtaggtcaggctgcggccaaagggcagcgccgcgccattggcatcgaaccagtagacgaactgctgcgcgaacagctgggcgcgctggcggtaaagggcagcacgccgggggtcggtatctgcggcaaatttagagtagagcagtccgtaatactggatggcccacgggatgtagtaatccttctgcaccgaggcgccatcggtggaccagccgtcgccgctgtaatagctgtcgattttgcaaagaccgtcctccagcagctccgggctgtaaggcatccccacgcttttcagggcaaggtttacaaggatgcggaaaaactgccagttgcagtccgggatggtgtgggcgttgatctgccccagccatgcggcaaggttctgtttttcggtgtcagaaagcggggtccacagcttttccggtgcggtgaggatgccgcaggcaatggcagccatctccacataacactggtcgtactccccggtggtgccccagtattcggggttttccgggtcggcgccggcggcaagacccttgcggtagattttttcaaattccgggtcagagccgccgcctacccagaagggcaccagcgcccacagcgggcggctgaaggcttccagctcaatggcattttggttgtaggtcacgcccgtctcgcccagatgcagccgggcacagcctgcggaataataaggcttgagcgggtcgagaaatttgtgcatcagtgcggtaaaatccgctttggtctgcaagttcatcaccagtacatctcccaatctttggtcaggcgggtcagcgcctccatgtaaaaataatcgccccagctcgtacattcatccacgccctccggggtgcaggtgttgtaggggctttttttgctgtaagtgccgtgcagcagctggccggagccgagggtgccgggctttaccgcatagtttgcggcaaggctggccagcatctgccgtgccagcgtgcgccactgggcagcttctgtttcgtccacatactttgccgcttccagcaggccgcaggccacgatggccgcagaggaggaatcccggggttcgccgctttccggggcaaagagcatatcccagcaggggatcatatcctccggcaggcgggaaaggtagaacgccagtgctttgcggaacacctcgaggaacttttcatcgtgggtgtaggtgtagccaatggcgctgccgtacacgccccacgcctgtccccgtgcccagaagctgtcatccttatagccctgacaggtgcggccgcccttgggggtgccgtccgggttcataaagaaggtgtggtaggtgctgccgtccggccggaaggagtttgccagcgtagtggcggtgtgggcggcggcgatctcgcggtagtggtcgctgccggtcacctgcgctgcccagtacagcagcggcacgttgagcatacagtcaatgatatagcggtagttgtcggggtcgtccatggtgccccatgcctgcaggaagcggccgctgggctggtagcgggtcagcagctggtcggcggcggcaatggcggcgtttttgcccttttcgctgcccaccagcttccatgctgccacgcaggtggggctgtacaaaaagcccatatcgtggtggtcaacctccaccttgcgggcaatgcggtccgcaaagctgtccacttgaatgagggcggcggtcttgaatttttcgtccccggtggcttcgtaggccagccagatttcccccggccagaagccgcaggtccactggttattggcacagccggggtagatattgttcacgctggaatggttctggcactggtaggtgtacaggggcagattggtctccacctgcttgcaggcatcggccagtgcctgccgtgcctcggcgtcggtcatagcgtggttctggtaggttttcatcatgattactccttaaatccaaacgtaggtatctctgcccaccgctggcgcagaaagtgcatacccagcttggggcggcggtcccgggtgaacaggccctttttgttgccgtccacccgcatggggccctgcacggtgtcgtagtctgcaaagttccagacaaattctcccacaaaccacgggcgcttgtcaaactctgcatccagacggcggtagaactccacctgaaactcctcactgaacatctcggctccggcggtgtgcagacctgccacggtgtctgcgccgtattcgctcatcatcacgggcttgtgctgctctgcccagaaatccatttcctgattcaggccatagcaggcggcgtccatgtcgccggaaaggttgtaccagccgtagtagcggttgatgcagacgatatccatggtgcgggtggtgatatccttggtgtagtcgttctggcagcagacgagggtgaccgggcggttctgcgggtccagctgatgtgccagctcatacagcgggtgccagtaatcgtaggcatcctgcgggaagtgctccagatccggctcgttgccaaggctccacagcaccacgcaggggtggtttttgtcccgatggatcatctcggcaagcacctgccggtgatgctccgcaaggggatattccttgtaaggattcaccgccgccccgccgccgatgcccaccgccggggtctcgtccatgaccagaatgccctcccggtcgcacaggtcgtagaactcctcagcgtaggggtagtggctggtacgcaccgcgttggcgtttgcccagtggatcagattcacgtccttcacgttcagcaccgggtcaaagccgcgtccatgggcggtaaagtcctcgtgcttgcaaaagcccttgaaatagagcggttttccgttcaaaagcacctgtgtgccccgcacctcaatgctgcgcacgccaaaggtctgatcgtagacgtctgccccgcaggtgatgtgcagggtgtacaggtagggcgtgccgggtctgggctcccagagatgcacttccgggatggtgatcgtgccttctgcaccctcggcgcttgcaacggcgttgccgtccgcatccagcaccgtgacatgggcaggcgcgctgccggtggttttgaccgcgtactgcaccgtgccgtccacggcgggcactacggtcacatcctcgatatactcttttggggtggtgtagagcaccaccgggcggtggatgcccgcatagttgaaaaagtcaaagttggggcggttctggggtgcggcggcgcgcttggcagcctccacactggggatgcccgcgttgtccgatccaaagaaggccagttgtccgtcctcgttgcccacaggcagggtgctgtggtttacccggttgtcgcaggcgacggtcagcagcaccgtctcgccggggtgcagcagggcggtaacgtctgcttcaaagggggtaaagccgcccttgtgctgtgcgataagctggccgttcagccagacgtttgccgtgtgggtcaccgagccgaaccgcagcaccacccgctgccctgcgcagaaggcgggcagggtgactttgcgctgataccatgcccagccgtagtggcggcgcagggcggtggtctggtcgttctggtcgttgtagctggcgggcacggcgatgggctgggcatccggcaggggctttgcgggatcgaactggtcttccacgcagctgcccagcgcaaacgcccatgtgccgtcaaggctcagcttcaagcgcgcttcattctgttcaggatataacataacactttctctctatttctgcaaaaaatgcggggcgcgggtactgcccacgccccgcttacgggtgatttgtttagcccttgatgccggtggatgccacgccctgcacaaaatacttctgcagggagaggaacacgatcagcaccgggatcagtgccaccacagaggctgccatgatcaggccgtactctgcggaatactgggtgatgaacatacgcagaccgatctggatggtcttgagctcggtcttagtcaggtagatcagggggccaaggaagtcgttccaggtgttcacgaaggtgaagatggtcagggtggacagggcgggcaggctgaggggcagcatgatgtgccaccagatgccgtactcgctcaggccatcaatgcgggcagcctcacacagctcggtgggcacgccctcgtagaactgtttcatcaggaacacgccgaaggcgctgaaggcttgcaggcacataatggccagatgggtgttgttcaaatgccacgaactcatcatcatgaactggggcaccatgtaggcctgccaaggcactgcgatggtggcaatgtagccgaggaagagcgcgtttttgcccttgaactgcatctttgcaaaggcgtaggctgcaaaggaggaagtgaacagctgcaacagggtgaccaccacggtgatcttgaccgtgtttttcacaaaggtcagcagcgggatctgggtccagatgtccacatagttctgccagcggggatttttggggatccactggatggggaagccgaacacgtccttattcagcttaaaggaggaggacagcatccacaaaaagggcagcagcatacaagctgtgatgacgatgaggaagaaatagatcaggaacttggagatgaagttgcggcgcttctgagaggcttcggtcttgataatagcagcagacatagttcttcctcctttctcagttctcgcccttggagccgcggaactggatgatggtaacgatcagcaccagtacgaacagcaccatggaaattgcacttgcgtagccgtatttcggggtattgacgaaggccacattatagatgtaatacaccagcgtcatggtagcagtgccggggccgccctgcgtgatcatgtacatctggtcgtagaccttgaagccggagatggtgagcataatgaccacaaagaaggtggtggggcgcagctgcggcagggtgatgtgccagaactgctgccagcgatttgcgccgtccagctcggcggcttcgttcaggtccgggttgcagccctgcaggcctgccagatagatgaccatgtagtagcccatgttcttccatacactgaacaggatgaccgtgatcatagcggtgtccttaccggcagcccagcggggcaggttttccaccgccacgccaaagaactggttcaggatcatattgatggggcccatggaggggttgaagatcatgttccacaccgctgccaccgccaccagcgaggcaacataggggaagaacgccacggtgcggaagaagttgcgcaacttcacgttctggttcagcagcacagccatggccagcgagcaggccagcgtaagcggcacggtaccgatgacatagacgacggtgtttttcagcgccgcctgaaaaattttatcggtggtgaagagctttacaaagttcttcaggccgataaactcgatggcgtggcggccgtcccatgcgcagaaggccagcgcaatggcaaacaccatgggcaccagcgtaaacacgcagaagccaatgaagtttggcgcaatgaaggaatacgcgatcagagaatcgcgggtcgattttttaagcactttacggggagttttattctggacagcagcactcgccataaaagagcctcctttcccggaagtataacagcttttccaaaaaatgagcggggcgggcgctttgcatacccgccccgctcggacagggcttttttccgatgctcgtcatcggaaaatgaatggggatcgaaaatgatgaagaaggagaaccgcaaaccattgcggaaaacgctttatcagccgagaactgcgggaacctgatcgttcatgttctggatgccctcgtccacggtctcgctcatggtcataatggcatcgtgctcggcgttcagaatggtctcgatatcagatgcgtactgggtgtagggcatttccagatagacattgctagtggtcagtgcatccacagaattgctgtcctcggggaagccctcggtggacttgatgatctcggcggtggcagcggagccgcaagccgggaaggtgccggtcttggcaatggcctgtgcgccctcctcggagacacaccagttgatgaagtcggcagcggtctctgccttgggagaatcggcgttgatggccagactggtcacagtgcccagcgtagaaccagcctctgcaccggcggggtgcggatacttgacgatgccccagttgaacttggtctcggcatccttcatgtaagcttccagcgtggaaatgaaccagctgcccatgttgaccattgcgcactgctggttctcaaaggctgcggagtagtgcagagaagaggtcttgaggtagccgtagtccatgcagatgccgtccttctgctgagcaatgaccatatcgtaggtgggcttcatgaagtcgtatttgccgtcgatgatggtgttcttgccgtccagaatggagaacagagaagcggcggagcgccaggtgtggtagtggcagccatagaccttggtgtcgccggagccgctggtcatcttgcgggccagagcatcgtaatcttccatcgtcaggtcattggagggatactccacaccggccttatcgaacagatccttgttgtagtacagcacccagaagtcgctgcggaagggcacggcgtagaagttgccgtcatcggtggtcagctgctcgatggtgccgttgaaatcaccggtatcgcgggtcagcacctcgttcaggggcttgaggtagtccagattgatcaggtttgcgtagccggggatatccttgacggtcacgacatccagatcggcgctgccggccagctgggtagccagaacggtcatgtaatcgctggagcccagatccaccatctcgatggtcacgtccttgtggcttgccatgtagccgtcggccatggcctgccagtagggggtggattccttatcccacaccgaccactgcagggtaacagggcctgctgctgcggatgcagcggtggaaccggcagtggaggaagcagcggtggagcttgcggaagagccgccgcaggcgctcagagcagcagcagcgccgcaggcagcggcagcggtaaggaacgaacgacgagagatctttttcataagtgtgtcctccttcagggcagtgtgtgtattgcgtgcaacggtctcccccgtgccggggagccactcgcttttgttgacactaggataccgcacaaacgcaaaaaccggaatggaaaaattccgggaagagttgcagtttttctgtatcttttaaaaaaagatgcactttcttacactggagtctgcactttcttgttctcttgcacagtttacatccatggcacaagaaaaaagcgtataaagtacacaattttcatgaaaaaagtcgttgacaaaccgcgccggaatcagtactgtataaaggaaagaatgcaaaatattaccggaaaggaggctccgctatgaagagcagccatcgtttcccgctgcggcggcagatcgtgtgggggatgcgcttttttaccatccttacctcgctggccgtgggcgcggcgctgttcaccctctccaaccaatatgtgcgcgccaactccttgcaggcggcagagttcaacctgcggctggtggctacctccatcgagaccagtctggacagcgccgatgctcttttgaactgggcttccatcgacagcaccgtgcggcggtacatctcgcaggaaaatatcaacggcacccagaccattgccgcctacgaagccgtgcaggaaaaatactattccagcaccctgtacagccatatcctccgcttttttattaccaatgaaaacgaccggcatttgcagttcggcacgctgaactcctcggcggcgctcaaccgcaccagcataaagcagtttctccccaaggggtacgggatgcagttcaccaccgacccgctgctgcccggcagtccggactgcatcgccctcagccagcctgtccgctgcggcaagggcaccttgcaccggggcagcacctaccttgcgctggacaccgccattatcaccgacccggctgcgggctacaacctgaccgacggcagcgcgttgtactgggaaatgggcagccgcctgtggcagatcgaaaacggcagcctgaccgagaccgagaacccgctgcgggaggtggactacaccctgcgcaccggcagcaataacggcgtgaccgagcagaccgcatggcagggcaaggtgcggctggacggccagaagtattatgtagtcaaggtaacactgaacggccgcagcgcggcgctggtgcagcttttgcccgcaaatacctttttgctgcactacggcgtgtacctgtggctcatcacccttggcattgccatcatctggggactgagctttttgatgcagcactggctggagtgggtcatcacccgcccggtggaggcgctgcaaaagcgcatcgagaccgtgggcagcggcaactttgccccggaccgcacggtggagtggaacaacgagctgggcgacatcggccggggcatcaaccagctggctgaaaacgtggacagcctgatgacccgccgggtggaggacgagcgccgcaagcaggagctggaataccggatgctgcaaaacgaggtgaacccgcactttatctacaacaccctcaacagcatccgctggatggctaccatccagcacgcgcccggcattgccgagatggtcaccgcctttgcgcggctgaccaagagcatctccaagggcacccagaagctggtgcctttgcaggaggagctggcgctgctcaacgattactttaccatccagcaataccgctacggcggcgacttggaaattgaggtctcccgcattgaaagcgagaccctttgccgggactgcatgatcccccggttcaccttgcagccgctggtggaaaacgccatcttccacgggctggagccaaagggcggccacggcagcgtgctgctggatatctccaccgacccggataccggagacgtactgctgcgcattaccgatgacggcgtgggcatgccgccggagcaggtggcgcatcttctggacgagcccgccgagggtgccgaaaaggctgaaaagttccgtcatgtcggcctgtggaacgtgaaccgccgcatccggtattcctttggcgagggctacggcctgaccattgaaagcgaagaggacgtgggcaccgaggtcaccatccggctgccctatcaacagaaaggagacagccatgctgcggatattactggtggatgatgagccgctggtgcttatcggcctgcaggggatgctggaatgggaaaagctgggctatacggtctgcggcaccgcccgcaacggcaagctggcgctggaactcattgagcgggagaagccggatatcgtcattgccgacgtaaaaatgccggtgatggacgggcttacccttgcccgcacctgccgggaacgcagcgccttgcccgcctttatcatgctgaccagctttgaagaatttggttacatcaagcaggccatgggtgccggggtggtggattatctggtcaagctggacctgacccccgagaacctgcaaaccgcccttgccaaggccgccgaaaaggtaaaaaaggagcgcgctttgctgggcgaattgtcggcacaggaaaaccttgctgagagtgtgcgcagctatcaggagcgttttttcgtgcggctgtacgccgggctgttcccggacgaagccgcattggagcagcctttgcagcacatggagctgaaccttgcaagcgacgcctatcttgtagccagctgcgagatcatcgccaacaccgcccttacccccgcccagcagctgaagctgagtttttcctgcgggcggatgctggagaccaccctgcaaaactacctgccctgctatgtgaccggggcggatgccatgcgctgcaatgtgctgttctgcctgaccgatgcccagtgccagaactaccggacggtgctgcgcccactgctggaacgcgccagccaaattctatacaactatttcacggtacggctgctctgggcggtaggtcgtcccaccggctccctgctggggctggcgcgctgctgccgggaaaacgcccatttgcagcccctgctcacggtggagcagcccatccagttcgtggaggtcaacgagggcgacgccaccgccgggaagatgcaggtggtggcacaggtgcaggagtacatccagagccacctttccgagcggctgacgctggccgatgtggcggctgtattcaatttttcgcccaactacctcagccagctgtttggcaaatacggcgacagcggctttgtggagtacattaccgaaacccgcatcgctgcggcgaaggagatgctggaacagggcgatttgaaagtatacgagatcgctgagaaactggggtacgaaagcgccttttatttttccaaggtgttcaaaaaggtcacggggctcagcccgcgggaataccagcaaagtatttgaaatcggaggcttctatgatacaggaacaacttgcccatctgccggaatttcttcccgattaccggcccttcccccctgccaaggaacgtactgcatggcaggggctgcccctgcgggcaaagcagcgctttttgcaggcggggaaagccgcgctgcaaacgcccattgcgcccctgccgctctcgctctggctggatttcacccacaccgggcggcgcaccccatgggaggcggcttacttctcccgccgggcgcggctttgcgcgctggtaagtgccgagtgtgtggagcacgaagggcgctttctggatgccattgcagataccgtatgggcgatctgcgaggaaagcgcatggcaactgcccgcccacaacagctatgtgcgggacaccccgcagctgcccctgccggacaccacccgccccatcgtagatttatttgccgccgagaccggcgcgctgctggcgctgacccggtacttactgccggacgagctggatactgccgcgccgggcatcacggtgcggatggagcaggagctggacgcccgcatcctgacgccttattttacaagccacttctggtggatgggcaacggcgcagagcctatgtgtaactggacgagctggtgcacccagaatgtgctgctcacggtctttctgctgcccaccacacagcagcagcggcaggttgccgtcaagcaggcagcgtacagcctcgactgctttttaaaggactacggcgcggacggctgctgcaacgagggtgcacagtattaccgccacgccgggctgaccctgtggggctgccttgaaattttgtccagcattgtgccggaggccttctctcccctgttccatgaacctaaaatcaaaaacattgcagagtacatctgcaacgtccatgtggaagggccttactacctgaactttggcgattgcagcccccttgccgggcggtgcggtgcgcgggaataccgctttgggcaggctgtgggcagcgatgctttgcaagcccttgcggcggcagacttccgtgccgatgccgaccccgaccatttgcagaacccggacggcagcacccacatcaacctgtggtaccggctgaccaccgcctttgcagaagaagaaatgatggcgtactccgcagcgccccggcaccatttaacggtgtggtatcccagcgtgggcgtctatgccgcgcggcagggcagctgggtgctgggtgcaaagttcggctccaacggcgacagccacaaccacaacgataccggcagcattaccgtatacaaggacggcagaccgttcctgatcgatatcggagtggagagctacaccaaaaagaccttcagcccccagcggtatgagatctggacgatgcagagcgcatggcacaacctgcccacctttgacggcgtgcagcagctgcccggcgcggaatacgccgcccgggaggtgtgcaccgataaaaacagcatcaccggcgaactggcgggcgcgtacccgcccatcccggggcttaccacctaccaccgcagcttatcgatcagtgaacagggcatcaccctgcgggacgaaacggactatcccggcacggtggagctgaccctgctcaccgagcagaaagccgcccccaccgcggacggctttgcggtgggcacactgggcggcattcggtttgacccgggtgccgtaacggctgctgttacggcggtgcccatcaccgacccgcgcctgcgcaccgcatggccggaaacaatctataagattaccctgcatttccaaagaatgctgaacctcgaactgtactaaggagaactgccatggagaccatcaagctgaaaattctggacgaagcaggtcacaccctgatgacctgcgacgccgacaccgccgtatcccttgtttacaccaacgaataccaccccggcgaccgggtggcactggagatcgaccatcccgggcagtactgcgtcatccagttcgaggacaccatgcccgaagcccttgtgtatgtggtcaagcgggagatcaatttccacattcccttcggggagcaggccatcacctattcgcccaagagctttgtgggcagccgtcatgtcatccgggcacggctggcgctgccggaggagattgccgcccggcggaatctggcctttaactgctatgacgagcacggcgacaccggcttttacccccacgccagcgccaacgtagaaacgcgcggcgaggcggtgtttgccgcccgcaacgccatcgacggcatttttgagaacagcgcccacggcgagtatccctaccagagctggggcatcaaccgcgacccgaacgcagccctgacgctggattttggccgggaagtactgctggatgagctgcgcatcaccgagcgggcagattttccccacgacaattactgggtcaaggccacggtggaattttccgacggcagcaggttggacatcccgctggtgaaaagcgccaagcctcagagcgtggcctttgaacccaagcgggtgcgcagccttgtgctgaaggatctgattcaggccgaggggacttcccccttccctgccctgacccagatcgaagcctttggcaccgaggtgaagtgatatgagcatctacaatgccctttatgggcgggacggccatggcgtaggcccaaacaagccggagaaaaaaggctttgcacgcttttgccagatggtcggccgcgacctcggccagctgctgggcacgaacctgatggtctgcgtgctctgcctgcccgctgcgctgggggtctcgctgggggtcaccctgctctccctgccgctgacggtggtgtgcagcgcggtcaccggtctgctgaccggccctgccatggtgctgctggcagactgtgccctgcgcagcttgcagaacgacccctctcagtggctgccccgggcaaaacagacccttgccgcccattggaaagccgcctgcggctttggctgcattggcacgctggtgctggggctgctgtgctttgtgtctgcctttgtgtttgaagccgccgcgcagcaggggtattaccccgggcttgcggtgctggtatttctggcactggactttctggtgctggcggttttggctacgctttgcgccgccgttctgccgctgcaagcccccgccccggacgtcctgctgcgccggacgggcaggctgctggctgccgccccggcgcgctgcgtcttggcaggcgttctcatgctggcgggcatcggcgggatgatcttgctgttcccggtcagcatcttctgggcggtgctgttcggtttctggctgccggggctggcggcgatgcagaccctgttcccggttttgcggcaggaatacggcgtagaggtgcgcagcatcccgcgcccgacagcgccggataagcccctgaccgcacaggagcagaaaaagcgctcccgcgccaactggtggtattataactggggcatcgtggcggtggcggcaatggtcattgtgggcgtagcgtatgtggcgcacggcctgctgactaccgtagacccggactataccgtggcggtggtcacggcagaagccctgccggacgaggccgtgcagcgcctgcagactgcgctggcagactatgcggaggacgctaacggcgacggggcggtcatcgtgcagataaacaactacacatggagcgccgatgccgccctgaccgacatgaacgggcagatggccggtgccacccagatgaacaccggccttgctaacggcgaaagcaaaatttggattctggacgacccggagggcttcgaacaggcctatggggcgctgagcgaaaagctgggcgcggactggcaggcaaagctcatcccgtggagcagccagcccgccctttccgggctggaactgggcagctacaataccgccgccgacggaagccagaccgtggatattcagagccgctttgccgggtacagcgtagcagtgtttgatgcttcagatgcgctatggcaggcgctcaattcgtaaaaaa

SEQ ID NO: 13877 - DNA, 2158 bp, Unknown
  gut microbiota DNA sequence
cgtctgaacgtgataccgtgccatgacctcacactttccgtgggcgagccggacaacgccgctgcaaaacttcgttcggagcaaacggtgaccccattacatgagcagagcccagctacttattttttgcgtcttaacaatttggaaacatttgttgaacttgtcggggcgaggcccctccatctgctatcgcagaccgttctgccgcttaaaagccccactggggctttcattgctgcgctgcgcaaacgcggtctatgcgttttgagcgcagcggtagagggggacaaacgtccgggcaaagctccctttgcgggtgttgtattttgtcttatccggcagccacggcaaaaagcaagccgccttgtgctgtggggatggcaccagccgcccttgtggaggtgcttcatcttctcctgcactcccttcttcttttgacatttcctttgaccgtaagcagggggatgcatcgattttgcactcatttgtccgcgtgcgtccagtagcgtccggctcaccacagagcttgccgtcttggaaagcgccagccccacttcctgttccagctcccggatagcattggtcaggctggactgagaaatatagaactgctgcactgcatggctgatggtaccggtgccggcaacagccgtgacatagcggagttgttgaagggtcacggcagtttcctttcggtgtgttttttctatcctaccgcagagccgccaaaaacgcaacgtattttcttctttgaaataccaaacgaacattgccggcatatccaagatacgttttacccgccctgcaatttcccttataatagcaccgcagtcttgaaacggctgcaacattcccatatcacaaaggaggctttccggtatgggacaacggcaaagtgagatcatcaaaaatcacatggaagtctactggcacgactatgcgtcggccagcaagggcgtccccattaccgaggcggggcttgtggaaaaagcctccgtcattggacgcaccgggctgatgctgctggaatgcggcaccggcgcatggcgtgtccgaagctccatgaacaccctttcgcgggagctgggagtcacaacaacagcggacatcggcctgttgtccattgagttcacctgctttgacggtgaccagtgttatacccagtcactctgtctgacaaatacgggcgtgaatacctcccggctgaaccgactggagcatttcgtcaacgacttcgaccgggaaggaaaatttatgaccggcgaagaactgcacagccacctcgatgagattgagcgcatccacggcttgtattcgcccatcgcactgggctttgcagctgcactggcctgcggctgcttcacctttctgcttggcggcggcattgtggaaatgctgtgtgccttttgcggtgcaggcatcggcaactttgtacggtgcaagctgacaaagcaccatttcaccctgtttctgggcattacggcgtcggtctgttcagcaagcctcgtgtatgccatcctgctgaagctggcagaggtgctgtttaccgtatcggcgcagcacgaggcggggtatatctgctccatgctcttcatcattccgggctttccgttcattaccagcggcatcgaccttgccaagctggatatgcgctccgggctggaacgtctggcctacgccgtcctcatcattctggtggcaaccatgacggcttggatcatggcactgctgctgcatttgcagccggtgcagttccctgccctgagcctgacactcccggaagagatcgtgttccggctgctggcaagttttggcggtgtgttcggcttttcgctcatgttcaacagtccccggaacctggcagtctgcgccgcccttatcggtgcggtaacgaacacgttccggctggagctggtgagccttgcgggctttccgcccgctgttgcagcgtttctgggcgcactgctggccggactgctggcctcctgcctgaagagcgccgccggttatccccgcatctccgtcactgtgccgtccatcgttatcatggtgccgggactgtatttctaccgtgccatctataatctgggcatcctgtctctgatggactctgccacatggtttgcagatgccattctcatcatcgtagcactgccgt

SEQ ID NO: 13878 - DNA, 852 bp, Unknown
  gut microbiota DNA sequence
cagttcgtccaaaccgattttttcattacggtattctcatatcgtttatttaacttccgaagttcctcatcgcggcagtaaaatcggctcattttgttccctccccaaagtgtatttatcgaatttatatactcgtaagttagtttcttacgagtataatacttcatttcttacataaagtcaggaaatatatttttgacggctcatcgagaaacaggaacgatacttcctattttcctcaaaaattgtgaactctgagttcctgttcatttcgttccgcatcggttacaatacagccatagcttcggcaagcgttcaaagcagccctcaagctatcccgccccttgaaaattgaacacgcattcttcagtcacgttcctgtgatgatgagccacgtccgtaacaaatgcgatgatctcccactgagggaatgagcggtaggttgacggtaaatggatgacagcttctccatagctaagagccatcacagaataatgatacttctgccttcgggcagctcggtgagaaccacggagaggtgagaaccctatggattcggtacgctgccggacggctgaaagatttcccacacgaaaacagagttttcggtttccggggatgtcggggacaaatacggaaaggtatagaactataaatcacagcaatttgctgtttgagatagtagggtgggctgtgcgagcagcccactgttacatatacggatagaaaggagaaatcaaaattggccacacgaggtaaaaaagagaaagagtatccgcctatgcccgcaaactggatgtacaagcgcggggatgtctacatgatggatctgaatccttacagcggttccga

SEQ ID NO: 13879 - DNA, 1750 bp, Unknown
  gut microbiota DNA sequence
gggggggggtactaccacattatgggatgggacatcgttggatgatttcgcagaaaattcgagctttctgcgggaagttgtattttgattattgcggcaagaatgtggacataggaagaagagcacatctttcgtctaaaatgcgcttaggaaataattctggaataggagatttctgctatatccaagggccggtacaaattggcgaaaatgttatgatggctccttatgtggcactgattgcggcaaatcataatgtttcaagaacgaatgtgccgatgaatcaacagggtgcatacgagaaacaaattacaatcgaagatgatgtatggatcggatacggcgcaaaaattttggcgggtgtcactgttggaaaaggtgctgttattggagctggcgctgttgttacaaaaaatgtcgcgccatatgccgttgtgggaggtatcccagcaaaagagattaaaatgagaaattaaaatggtttgaggttttcaggatgaaatgtgcctttattgatttgggaaaacactttggtggtgcagaaaactaccttcttgttttgatagaaagatgggttgcggctggaaatgaagcagtcgtattgaccaaaaagaaaagtaaatttgaacaggctattatggattcccaaataaaggcggaaattcatggggtggatttttcatacagtgatataaaaagaacaagaaaacttctgctgagagaaaagatagatgtcatagatgttaatgccatcaattctggacttcttgcagttttgatgaatctaccaatacgacgtgtgacaacagttcatagtaatgcggatgtcgatagagccgataaacctagactggtaagaaaagcatttgttgcattagaaaactactgccttcatagaagtaaaaaagtaattgttgtttccaaggcaattgaaaaattactgctggaaagaggaattgagaacaacaaaatttacttgataccaaatggtgtaaaggaaatctattatgctgaaaaaagtctgaggtcaaatgaaatagaacctttgcggatatgctatgtgggaagattggaaaaagtcaagggatgcgaatatttgatttcggcactgaaaaggttaaaaaatgtggattatatatgcgatatctacggtgatgaaagtcttttgggaaacttgaaagaacttgctgccggggatgataagattcatttcatgggcttttcaagtgaagttcgcaaactgcttccgcaatatgatgttctcgtactaccatcgctctatgaagcgtttcctcttactattccagaggcaatgaatgcaaaggtgctgctagtttgcagtaatgtcggaggaattccatatatcatagaaaatcaagtgaatggctatttgtttgatatgggaaacgtcgaacagcttggaactattctggaaagtattgcaaagaatccgaaagaacagattcaaattatcgagcaggcgtatgatgattttaagcacagttatacggaagaagttatgattaaaaagacatttggggttttagaggagaattaaaaatgaaaaaagtaatgcttgtttttggtacacgtccggaagcaatcaaaatgtgtcccttagtaaacgaattaaaagggagaagtaatatccaaacggttgtttgtgttacaggccagcatcgccagatgctggatcaggtactggaagtttttaatgtaaagaataagcctcttttgctccggccgtccg

SEQ ID NO: 13880 - DNA, 286 bp, Unknown
  gut microbiota DNA sequence
tcctgtgctgcttggatcgcagcttgattttcatccagaagctgctggatcatatcacggtcaatgctgctctttccccggatgacgcgaatcatttcatccttcaatgcattccgttcgtcatccttgaggtcgagttcactctttgcgcgtgatacttctttctgcgctacttccatgtccttgcgaagcatatcctgaagcagcttgcttttggaacactctaaaatctccgaaaacttggtgcatacgatactctctacgattgcgtccagttttgttacac

SEQ ID NO: 13881 - DNA, 4052 bp, Unknown
  gut microbiota DNA sequence
gctgcgcgactgagaggattcttcccaaaatcgtcagatgacttctttcccgtgttttttccaaaagccgctttgacggtcgattttgggcaaaattcgcccagatttgggcagagtgcatgatgtatcccagagtttttgcacaaaaagtaggacatacccgtgacaacttgcaaagagacgtctgcggatttacaataaaaccacaaaagggccaacagaaaaaggacgaaagcaagcagtatttggaggtaatgaatatggagttgcgttcacaggaagtccgcactttagcacccgagaacgaccccctgaaaatgggtatgggctggaaggtcgaggatcttgcaaagccccagatcatggtggagagcaccttcggcgacagccatcccggcagtgcccatctggatcagttcgtcaaggaggccgtgcaggcggtcaacgataacggcggcaaggcggcccgctactttgccaccgatatgtgcgacggcatcgcacagggtcatgacggcatcaactactcgctgccccaccgtgacgccatcgtcaatctggtggaggcacaggccaacgccagtgtgtacgacggcggcgtgttcattgccagctgcgacaagtccgtgcccgccatgctcatgagcatcggccgtttgaaggacatgagcgccatcgtggtcactggcggcgtcatggaagcccacaccctgcccaaggagtatgtggtcaacgaccccgcctgcgccatcaacgagctgctgacgctggagcagatcggcaagtttgacgcatgggaaaagaccggcgtcatccccaacagccagctggactactacaagcacaacgcctgccccagctgcggtgcctgctcctttatgggtaccgcctccaccatgcagatcatggccgaggcactgggtctgatgctgccgggcaccgccctgatgcccgccaccgccccggagctgaagcaggccgcctacgatgccggcaagcagctgatggagctggtcaagaagggcatcaccgccaaggatatcgtgaccaagaagagctttgagaacgccatcatggtgcacgccgccatctccggctccaccaacgccaccatgcacctgcccgccatcgcccacgagttcggcattgagatcgatgccgacacctttgaccggatgcaccgcggcgcacactacctgctgaacatccgtccctccggcgactggcccgcacagtacttctactacgcaggcggcgtgccccgggtgatggaggagatcaagtccatgctgcatctggacgtgatgaccgtcaccggcaagacgctgggcgagaatctggaggagctaaagaagaacggcttctaccagcactgcgacgccattctggcggaaaagaccgccggttttgcccgcccggtcagccgcgaggacatcatccacagctttgataacgccaagggcactgacggcagcatcgccatcctgaagggcaaccttgccccggaaggctgcgtcatcaagcacaccgcctgccccaagaatatgtttgaagccaccctgcgcgccaagccctacgacagtgaggaggcgtgcatctccgctgtgctgcacggtgaggtgaagcccggcgatgccatcttcatccggtacgagggcccgcgcggcagcggtatgcccgagatgttctacaccggcgaggccatctgcgccgacccgaagctggcttccagcgtagcgctcatcaccgacggacgcttctccggcgcaagccgcggcccggtcatcggccatgtcagcccggaggctgcggtgggcggtcccatcgcactggtggagcaggacgacctgatccagatcgacgtgcataaccgcaagctggccattgtgggcgtgaagggcgagcccaagacccccgaggagatggacgccatcctcgccgagcgccgcgccaactggaagcccaaggctcccaagtacaccaagggtctgctgaagctctactctcagcacgccgtcagccccatgaagggcgcatacatggagtaaaccgctccacataaacaacaaaaagtaaactgtccggtgcgtttttccggacggcttggataagtgcaaccaaaaatcacgaaacggaggaaatttctatgacagcagttgcaacgcccgatgcggcacggctggtttttgctgccgtggcaggcctgatcctattgctcattctcattatcaagttcaaggtacacgccatgatctccatcctgatcggtgcggtgggcatcggcctgatggccggtatgcccctgtccgacatcatcggctcggtgaacgagggcatcggcaacaccttaaagggcatcgcccttctggtgggtctgggctccatgttcggcgccattctggaagaatccggcggcgcacagaccttggctgtgaccatggtgcggaagttcggtgacgaaaaggccgcgtgggcactgggcatcacgggtctggtggtggccatgccggtgttctttgatgcaggacttatcatcctcattccgctggccttctctctggcaaagcgcaccaagcgctccgtactgtactacgtcatccccctgctggccggtctggcggtcggccacgccttcatcccgcccacgccgggtcccgttctggtggctaccatgctgggcgttgaccttggctgggtcatcctcgtcggcatcttctgcggcatctttgccatgatcgccgccggtcccatctggggcagcatctgcggcaaaaagtacatggttgaagtccccgagcacgttgcacagcaggcagacattgacgagagcaagctgcccaagtttggcaccatcgtgggcatcatcatgatcccgctgctgctcatcatcgcaaactccgtggcaaaggtagtgcccgcactggcaggcatccagcccgttctggccttcctcggcgagcccttcatggcgctgctgctggctaccatcgctgctatgtacctgctgggcacccgccacggctacaccaacgcccagctggaaaagatcatgaccaagtctctggagcccaccggtatgatcctgctggtcactgcctgcggcggcgtgctgcgctatatgctgcagaactccggtctgggcgatgtcatcggcaacgccgtggcaaacgccagcctgccgctggtgctggtggccttcatcgtggctgctctggtgcgtatctcggtgggttccgctaccgtggctatgaccatggcagcaggcatcatctccgctatgcccggcctcagcgcgctgagcccgctgtacctagcctgtgtcaccgctgccattgcaggcggttccaccgtctgctcccacttcaacgactccggcttctggctggtgaagagccttgtgggcatggacgaaaagaccactctcaagacctggaccatcatggaaacgctggtcggcggcgtgggcttcctggtagcactggttatttccttctttgcctgagcgcctgtccggggcctgcaccttgggataagcgttgggagatctccttattcatttacctccttcaaaaacagccgctccgggcgcacccggagcggctgttttttgcgcctgcgtgacccggtcacggaaaagcgggctgcgtatggggtatactgatggtgtcagtaaaatacaacacccattcaggagggaaaaaatatggcagtcatcaacattaccaaggaaaactttgcacaggaagtgctccacagcgaaaagccggtactgctggacttctgggccagctggtgcggcccctgccggatgctgagccccgtggtggacgaggtagccgaggagcgcaccgatgtaaaggtaggcaaggtgaacgtggacgagcagccggacttggcggcgcagttcggggtgatgagcatccccaccctgctggtgttcgagcagggcaagctggtgcgtcaggccgtgggcgcccgccccaaggccggtgtgctggagctgctgggctgatttataatttggtaacaacaaagcgcccgccctatggttc

SEQ ID NO: 13882 - DNA, 1908 bp, Unknown
  gut microbiota DNA sequence
tattttatatggagttcagaagaaaaatgcgggattcagcttacagctgggggcctgcggagaccagagccttgccgtgctcgttgccctcgtacttagcgaagttcttcacgaagcggccagccagatcctttgccttctcttcccactgagcggcatctgcgtaggtgtcgcggggatcgaggatggcggggtcaacaccgggcagagcggtgggaacctcaaagtcgaagtaggggatcttcttggtgggagcctcgttgatggcaccgctcaggatagcgtcgatgatgccgcgggtatccttgatggagatgcgcttgccggtgccgttccagccggtgttgaccagataagcctttgcgccgctggccttcatcttcttgaccagctcctcagcgtacttagtggggtgcagctccaggaaggcctgaccgaagcaagcggagaaggtgggggtgggctcggtgatgccgcgctcggtgcctgccagctttgcggtaaagccggacaggaagtagtactgggtctgctccggggtcaggatggagaccgggggcagaacgccgaaggcgtcagcagacaggaagatcacgttctttgctgcgggagcagaagaaacgggacgcacgatgttctggatgtggttgatggggtaggacacacgggtgttctcggtgacagacttgtcagcgaagtcgatgtggccctcggcatccagagtgacgttctccagcagagcgttgcgcttgatggcgttgtagatatcgggctcggactccttatccaggttgatgaccttagcgtagcagccgccctcgaagttgaacacgccgttgtcgtcccagccgtgctcgtcatcgccgatcagcagacgcttgggatcggtggacagggtggtcttgccggtgccagacagaccgaagaagatggcggtgttctcgccgttcttgtcggtgttggcagagcagtgcatggaagcaatgcccttcagcggcaggaagtagttcatcatggagaacatacccttcttcatctcgccgccgtaccaagtgttgacgatgacctgctccttgctggtgatgttgaacagcacagcagtctcggagttcaggcccagctccttgtagttctcgaccttagccttggaagcgttgtaaacaacgaaatcaggctcgaagttctccagctcctcagcggtgggacggatgaacatattggtaacgaagtgtgcctgccaggccacttccacgatgaaacgcactgccatgcgggtatccttgttggcgccgcagaaagcatccacgacgtacaggcgcttgttggacagctccttctgagcgatctccttgacagccttccaagcctcctgggaagcggggtggttgtcgttcttgtactcatcgctggtccaccacacggtgtccttggagttctcgtccatcacgatgaacttgtccttgggagaacggccggtgtagatgccggtcatcacgttcacagcacccagctcgctgacctgacccttctcgtaaccttccagctcgggattggtctcctcggcgaacagctgctcgtaggaggggttgtgcacgacttcagtcgtgccggtgatgccatacttggtaagatccaactttgccatatttgcgtacctctactttcgtttgatccttacataactctgtgtaggagatgcagcgccatttatggtacggacaccgcataagggggagacagcacagaacgatgcaatgcaaattctcctgtctatcattatacacaaaagcttttcaaaagcaataaatggaaggttctgtttgcaaaaaagaaacaaatttcataaacaagctttcccacattaagtaaattcccgaagccctgcagggacgcagactgtgaaaaata

SEQ ID NO: 13883 - DNA, 1020 bp, Unknown
  gut microbiota DNA sequence
cggcaaaaaatgggtattccacagttttacccgcgttttccacacagttttcctgtaaaaaagcgcttttccacgcttctttttcggttttttcgcaaagtgtgttgaaaacccggtggaaattgttgaaaagtggcggatttttccacagaaaaactcccccagtccacaccgaccgggagagctttgccgtacatcagatatcaaagatctcgcagtcgtcctctaccttcttgcaggcagacagcacgttctccatggtgtcgtgggggtctgcaccctcggcaaactccaccttcatcttctgggtcataaagctgacggtcgccttttccacaccggctacggtgttggcggcatcctccatcttctgggcgcagttggcgcagtccacttcgatcttgtaggtctttttcataataagtaccagcctttctttttctgcgggcgtgtgcccggtcattcttcgatatggtccatccccatggagaggatgctgcgcacatggtcatcgtccagtgcgtagaaaacagttttgccttcccgccggaagcgcacaagcttggaatccttgagcacccgcagttggtggctgacggcagactggctcagctgcacggcgtccgcgatatcctgcacgcaaagctcgctgtcgtgtaaggcgtacagaattttgatgcgggtggaatcgccgaacacgcggaacaggtccgccagttcgtacagcacctcgtcatccggcatctccaccggctgagtctccttttccggcgcggcttgttctagcccggtcatgctgtcatcccctttcgtttcgatatatgagcatctgttcatgtgttcatgatagcacgcagacagccccctgtcaagcaaaatccgcaaagttttttacattgccgtaaaattgctgaaaatcgccgtaaaacgcaaaaaagatgcaatttaaatttgcaaatggggtgcgggttgggcagcagaacgatttgaaatggcttccgcttcttccgggttgcggca

SEQ ID NO: 13884 - DNA, 10218 bp, Unknown
  gut microbiota DNA sequence
tcaagaaccccaacaagaagtgatcacacaatgtttccccggagagcacccgccctccggggcttttttctgtcttgcttgcggtaaatgccgcttaccgttgcgacccctcccgtgaaaatgcgtttggagcgctccgcagagcgcgacaaacgcgaaataaaaataattcttccgctgaatatggctagagcgcaagcggaagccattttcaatcgttccaccccgcccggggcttttttgcgctctgcccaaaaatcccggcaaaaaacaggcacacttgccattgacgaaccctgccgcgctgctgtaaaatgaaagcagaatgccctgtgcatccgcatgggcccctgcattttataaaaggagcattgcatgaaaaagttaaagcgtcttgcggctgttctgctggccgggatcatggcactggcactgttcaccgcctgcagcgacagcgaccccggcaaccccgagtttgatcccaaggtggaaagcgcctatcttgacgcgctgaataatacattcgggacgagctttgaaaacgatgccgacatcaagaggctggccatcgagcacatcgaggagaaacatggcgcagacagcctgaccggcagtgcacgctgcaaaacagaaggcgacgaaaagaccgtggtgcggcaggtgcagctctgctttgatacaaaaagcagcaagccggatgcctttgtgccgcttttctacgaggccgcagccgcgcaaaccatcacggcgaaccggctcaatgttcaagccctgctcaacaccgtgaaggatgagcgtggcggcgcagagaaacacggcataacgctggagcttaccgcgctgggtgtcggcgcaaagaccatcggcggcaagacctatgttgccatcggctttgagctgaccaacaccaccccgtagaactgaaccccaccccgcccagaggagcaccccgctccccggggctttttgcgtgaacccctcccgtgaaaatgggatagcggagcgtccgcagacgctccgctatcccgaaaataaaaataatttttccgctgcttatgcgcaaagcgcacgcggcgcgcattccaaatcgtcccgccttgcccggcgggctttttttcgcctttttgtgacaaaccccgcccgctgtggtacaataaaagggtatcgaacttacacagaaaggacgtttccatgcagctgtttgaactggtcagcccacggctgttccgcccgctggcggggcccaaccgggcgttttatgcagagcttttgctgctgctctgggaggagtgccgccatacggcagattacagcatttcccgcgccgaggctgtctcccgcgccgaggattattttgccgcgctggcaaagccgctggcgctggacgccgacggtgcgggtgacgaggacgagcagcccacccgcgacccccacacgctggcggtgggctttttgctgcgtctgcgccgcaccggctggctggaggagcagcccggcagttatgaaagcgagcccacccttgcctttatgccggaggtcaccccgctgctggacgcgctggaagagatactgaacccccgggtggtcacctacaccggcaagctgtataaggcgtggcagctgctgggcagcatcggacaggaaaaaagcccctacgagaacgtgctgcgggaggtggcggcagaccttgagactttgaacaagtccctgcgcgccctcaacgcttccatcgggcattatatcgaccgcctgacccataaccgcaccccgcaggaggtgctggaactgttcgatcagtacgaggaaaaggtggtggcggcggcgtaccatcgctttaaaaccagcgataacctgttcaattatcgcgcctatctggaagaagagctggacgactgcgagcagaaccagctgccgcgcttagcgctggactacgcccgggtggagcgctgcgcccccggcgaggcggcaccccgggtgcgtgccctcatccagcagcagcgggacgcgctggaagagatgagcaccctgatgaaggagatcgacgccagccacatccgctaccgcaagcgcgcggtgcagcgggcacagtttttgctgctcagcgaccgctcggcgcagggcagcgtcaccgccctgctgcgccgctatgcggaggacatccgcagcccggagcagctgtttgagccggacgacggcccggtggcagcgcggctgcacctgtacccggcggcagtgttcggcgcaaagccgctgtatccccccgccgcgccccgcaccgaagcacctcttgccccggtgcgcaccgagccccttgaccccgaccggctgcggcaggagcagcagcttctgctggactacgcccgccttgccgtcaccgaggaaaacgtggcgctgctggcgcggcaggcactggctgcccgcgggcaggtgaacgcctccacccttgtggaggaatacccgaacgactttacaggcatcatcggcctgcacacctattcccagtcgccgcaccgggagtacgatatcaccatgaccggaaactgggtggagcgcggcggcttccggtttcaggattttgtcctgacccgccgcaaggaggtaaacacggatggcaaccattgatctgctggaagagaccgcaaactatctgctcaaccactgctttgtgctgggctgcgtagaggaacagcgggcaaaatatctgtatattcaggatcacctcaacgaggtgcgggcggtgttcaaaccgctgggctacgcggtgcttttgtaccccgcgcccatgcaggcggcggcgctggtcaacgagcacgagggcagtcaggcacggctgctcaagtacgagagcattttgctgctggtgctgcggcttttgtacctgcaaaagcgggaaagccttgccgccagcgcagacgaggtgctggtgaccgtagaagaagtacaggccgaattgcaaaagatgaacctgccccgcaagctggatcagcaaacgctggaaaagctcatgcgcaccctgcgccggtacaatctggcgcgtccggtgggacggctctccgggctggatagccgcatcgaggtgtttcccacggtgctgctggcgctgccggatgccgaccttgcggatgccgctgccgagagcgcccgcacccgcaccgagcttggcctgtacgagcgcccggagggcgcagacaccgaagcaggggagggtgaagcatgatcgaactcaagcgcctgaaacttatcaactggcacaactttgaaaataccaccttcgactgcgcccgcctgacctatatgatcggcgtgaacgccgtgggcaagaccaccattctggacgccatccgctactgcctgaccaccaaccgcaatttcaatgcgctgggcaataagaaaagcggccgcaccctgcagggctctgtccacgccaagcagcgcggcgaaaacgcctaccgccgcccggggcataccgtggcgtatatcggggcggagttctgggacagcgtaaagcacaccagctttgtcatcgcggtgcgggtggagtccgaaggccccatgcaggaactgcaccccggcgaccagacgtggtacatctcggaggacggcatcacgctggagcagctgccctttatcgacccgcgcaccggtgcgcccagcgccaaggaggacttcaagcccgccgaggggcggctttcctacacccgcagtcccagcgaggcgcgggaccgtatctgccgcgcgctgggcatcgggcgcgcagccagcccgctgggcaaaaagttcaacgaggtgttccagatgggcaccagcatggacgagatcccgaacttccgggagtttctgtaccagtacatcctgccccagccggaactggacttggaagcgctgcagggtgaccgcttggagctggaaaacctgcacgccgttctggcggaagcccagacccgcgccgatgcgctggacgagatcgtccgtttcggccgcgaagccaccgaaaaacagaccgaagcccttgtgaaccggggtgccgccctgctggcgcgggctgctgccgatgccggggaaaaggccgtctggcaggagcgggtagatgccggacgccgccagcaggaaacgctgcgcacccgctacgccgaagccaagaccgccgaagcggaggcccgccgcgcttacctgaccgcccacagcgccgccggtgccagcggcgagggccgcgcactggacgccctcagcgaggagctggcgcaccggcagaccgcactggatgccgccgcccgccgcgccgacaccgccgaaaaagccgccgaaaagaccggcaacctgctggcggtgctgcgccgcagcggctttgccgccgggcagaagatggccgacctgacccccgacaccctgcccgccctgaccgactggctgaccgcacaggaaaagccgctggaagaagcctattttgccgcccggcagcacaccgccgccctgcagcggcagcagaccgagaaacgcgccgagctggatgccgtatccggcggcaagtgggtgtacccccacggggacgccgccacccgggtgcgggacgccgtgaatgccgagctgaaaagccgtggcatggagccggacgcccgcatcttctgcgagctgctgaacgtggaggacgagagctggcaggactgcgtggaggcctgtctgggcgaccgccggttcgatatccttgtgccgcccgcccactacgccgccgccaagagcgcctttgtggcgctgaaggataaggtgggccccatcagtctgctggacaccccgggtctgcgcaaggccaaccgccgcgccgacaccgcccccgccgacagtctggcggcacaggtcaccagcgaaaacccgcttgctgcgcagtacgccgacaccatcctgcgccgcatcgtctgctgcgacacccccgacacgctggaaaactaccccgacagcgccacccgggaccttctgcgccaccatcccttccggttggaacgtctgcgcaccccgcagcgctatatcggcttggaagcccgccgcgcccgcgccggggcactggcaggggagatgaacgcccttgctgaagaagtacgcgccgccgcacaggcagagcagaacctgaaagccgcatacagccagtaccagacccttttgcgcggcacaacgctggaagaacttgccgctttgtgggacgcccgcgccgccctgaccgccgcccgcgcggcggtggacaagcaggccgcaaagctggccgagtgccgcgagaatccgcttttgcagcagctgtataaagaggaagaggtgcgcgaagccgcatgggaagccgcccgcactgccgtggagcagaccggcggcgacctgcgcgtgtgcgaaaaacagatctcctcctgcgaggcggagcagcaaaaggcggtggacaccgccgaaaagagcgcacaggccgcagaaagtttctttgccgcccacccgctggtggagccgctctcccgcagccgtcagcaggcgctgaccgggccggacaaatctccccgcgccgccgcgcaggccgccgaaaaggcacaggccaagctggacgatgcgctgaccgtctacctgaacagcacccttgaaccggcacagagagcctataaccagcgctatgtctgcgattatcctctggggcttgccgggctggaacagtaccgcgcccagcatgagagccttgtgcgcatcgacctggagcgctacgccgcccgtctggagcaggcgcagcgggactgcaaggaccgcttccgcaaagatatcctgttccgcatgaaggacgatatcttcaacgcccggcggcagttccgggagctgaacaaggtcatggagcagctgacctacggcgaggaggtctaccgctttgagctggagcccagccgcgacccgcagctggcggcgttctatcaggtcatcgtggacaagggcaaccagcagatgaccgagggcgattctctggataaccttgccgccaccgccgaccccgcctacgagcgtcaggtggacgagctgatggaaaaaatcatggcagacgtagacgagaacacccgcgcccggcaggagggacgcaccgctgccggtgccaccctttcggactatgtggactaccgcacctatctggactacgatatcaaggtgaccaatcaggtcaccgggcagcaggcgtatctgtcccgcgtcagccgcgattcctccggcggcgaaaatcaggcacccttctatgtggccatctgcgccagccttctgcaaatttaccagaagagcgagaacagcatccgtttggtgctgctggacgaagcgttcagcaagatgaccagcgaccgcatccgccccatgatggaactgttccgccgcctgcaattgcaggtgctgctcatctccaccgtggaaaagagtaccgccatccagccctactgcgatatcacctactccatcgtccgccacggcgacgccaacgccatcgcgccctttgtccgccttgcggcagaatgatgcaaagcagggcttgacatcaaaaataaactttgctatactgtttttcgctcatcggagggctgtttcaacgtaattgaagggccggataagatgtcatcgttcgcgcttcccggaggctgtgggcaccgtagtgccgcagcagaagagggaacgcaccggagcggtggttcttatccggcctttttgtatgtgcagagttcaaaaaaggaggagttatgccaaagaaagccatccaattgtccgaccactttacctattcccgcctgctgcggttcgtgctgccctgcatcggcaccatgctgttcacctccgtctacggcatcgtggacgggttgtgcgtttccaactttgtgggcaaaacggcctttgcggcggtcaacctcatcatgccgctgccgcagctgctgggcactgtcggctttatgctgggcaccggcggcagcgccatcgtaggcatcacgctgggcgagggtgaccagaaaaaagccgaccgctattttaccatgtttctgctggcagcgctcatctcggtcagtgtgctggccgtgctgggctttgtgttcctgcggccggtcgccatgctgctgggcgcaaagggagagctgctggactacgccgtgcgctacgggcgcatcctgatgctggcgctgccgccctttgcgctgcaaaatatgttccaaagctttttcgtcaccgccgaaaagccgcttctgggcttctggttcaccgtaggtgcaggctgcaccaacatggtgctggacgtggtgatggtgggtatgatgcactggggcgtggagggcgctgccgttgcaaccctcatcagccagctggtgggcggcgtgcttccggtgttctactttatcgaccacggcaataccagccgcctgcacctgtgcagaacacagttttacggccgcgtgctgtgggatgcctgtatcaacggttcttctgagctgatgaccaacctttccatgtcgctggtcaatatcctgtataacttccagctgctgcggcttgccggagaaaacggcgtggcggcttacggcgtcatcatgtacgctgccttcctgtttgtggcggtgttcgtgggctatgccgtgggcagcgcacccatcgtcagcttccattacggcgcgcgcaaccatgccgaggtgcataacctttatcagaagagcctgcgcctcatcgccgtggtagctgtgagcatgaccgccgtatccatggtgctcattccctatgtggcgcgcatctttgtgggctacgatgctcagctgctggcgctgaccagccgcgccttccggctgtatgcgctgagcttcctcatcatgggcttcaacgtgtatgcgtcctccttcttcacagcgctgggggacggcgtgacgagtgctctcatctcttttctgcgcaccctgctgttccagcttgccgcgctgctcctgctgcccgccctgtggggcattgacggcgtgtggctggctgtcaccgtcgccgagctggccgcgctggcggtgagcgtgtatatgtttgtgacaaaagaccagaaattccattaccgtcatgtttgacgagtaataacagaaaagccgccggggccccggcggcttttttggttattcaaaggtatactccaccagctggcagtttttgatgcctgcagcggcgtattcctcgttggtcatatcgtaaaaataggagtgcaccacccgggcaatgccgttgtgcgccaccagcaggtaggtcttgccggtgtccgccttcaactcgtccagcagattgtagatgcgctgtgccagctgcatcatgctctcgccgccgtcatagcggtcggcaaagtgggtcttggagatgcggaactccgcaccgtcccggggcgtgccctcgtatttgccaaagcactgctcccgcaggcggggctcgcagcgggcgggcagaccggtagcggcggcaatggcctttgcggtgtcggcggcgcgggagaggggagagtacaagatctcgtcaatgtgcaggccgctgtcccggacaagctcgcccagctgccgcgcctgctgctgcccgcgggcggtcagcgggctgtcggtcatgccgcagatcttattttccacgttccataccgtctcgccgtggcgggtgaaatagatattatgcataaaattactccttacagcttgtgcagggtgccgtccggcagcagacaaacggtgtctccctcgtcgatgccaagacatgtcagctccctgtccgggtagggcagaatgcgggcagccccggcggcatcggtcagggtcacatcgcacagcaccggctgcccggcgggcagctcctcgcagccgtacagctgctcgtcaatgcgcagcacgcggtattccggcatggtacagcccctcctttgtgtttttccttattatatagcacccgggggctttggtgcaagggggagcggactgagagggtttattctcccccgcttgacagcggcgcggagaaattgttacaatacagttacgactgcaaacaacgcggaggggttcatgaatattacggaactgcggtatctggtagccatcatgaaatgggggtcggtgtcggcggcggcaaagcagctgtacgcggcgcagcccaatgtgagcaaggcgctgaagaatctggaagaggaatacgggttgcgcatctttgagcgctcctccacgggcatgatccccaccgagcagggcaagcggttcatccggcaggcgcagcgggtgctgcagcaggtggacgagctgaagcaggaggcgcaccagcagcgcagctgcgccgagctgcgggtggtgctgacccatgccacctacgcctcctatgcggcggtggattttttgcagcaggcagcccgcagcgagcagctgcgggtgcatatccgggagagcggtgccattgaagctttggattttgtgctgcggcagggctaccacatagcactgctgcgctatgccgccgaggacgaggactattatctgcgctactgccagcgccacggtctgcggcaggagcctatcatggagttttcctacctgctgctcaccagtcaggacagcccgctggcgcggcggcaggtgcgcgagctggacgaactgaacgattacatcgaggtgctgcacggcgacacccatctgcccggggaggagagcactgtttcccgctggcaggcaaaccccaaccgccgcatccatgtgtacgagcggtgcagccagttctccattctgcaaaacctgcccacggcctatatgtggtcgtcccccatgccgcagcgcgcgctggagcagtaccatctggcactgcataactgcccggcgcagaagcagcagatgcgggacgtgctggtgtacccggagcgggagcctttgcagccggaggagcagctgtttgtgcaactgctgcacaagcaggcagatgccaccatcaaggacagcgggtggaagaagatttgaaatgcgcgccgtgtcttccgggttgcggcacccagcatccgcatcgtgccttgggcggcacgcgcgtcttgctggccgctgccccaacaactcctccctgtttccgccgctggcggcggtcgtcgttgttgcagcggaagaattatttataattaattagagcaatgtcgggcagcctgcgggctgcccgacattgcattttcacgagagggggcggatttcccttcttttcgtc

SEQ ID NO: 13885 - DNA, 3114 bp, Unknown
  gut microbiota DNA sequence
aaatgcacaaaaaggcggcgcaaagtttggcggggacgcttttgaccgtttccggaagaatatttttgagaaacaatagagcaaattaaaacgaaccatcgacataaaataaaagtttaaataaacaaataaaataagctgccatatactttttgatataggaaccatacctaaaaaatattaacacaattatgaaaaaggtgttaacatgaagccagagatcggtcatagccgcagtatggcataagctgtcggcggctgaaattcaaaaggaggtttctggtatgattagtttcttactgtgtctggcgctccttatcatcggctactttgtctatggtaagatcgtggacaacacgttcggaccggacgaccgcgaaactcctgctgtgcgcatcaacgatggcgttgactacgttgtgatgccccagtggaagctgttcctcgtccagctgctgaacattgcaggtctgggccccatctttggtgcactgcagggtgctctgtggggtcccgtggtgttcctgtggatcaccttcggcaccatctttgccggcggcgtacatgactacttctccggcatgatgagcgagcgcaacgacggcgcttccatcgctgaggtcaccggccgttatctgggccccgtgatgcagaacatcatgcgtgtgttctctgtggtgctgctgatcatggtcggtaccgtgttcgcagtcggccccgcaggcctgatcgttaccctgtgcaagaacggcggtatgtccggcgtgctgaccaccactctgttctggctgatcatcattctggtgtactacttcatcgcaacctttatctccattgatgccatcatcggtaagatctaccccctgttcggcatctgcctgattatcatggctgtgggcgttgtctttggtatcttcaccaaccccgcctacaccatccccgagatctgggcaaacttcagcaatatgcacccctccaacactcctatctggagcttcatgttcatcaccgttgcctgtggtgctatctccggtttccactccacccagtcgcctctgatggctcgctgcatgaagagtgagaagcagggtcacttcgtattctacggtgcaatggtcagcgagggcatcatcgctctgatctgggctgctgccggctgcgcactgtacaccatcaccgatggcaagatggtcggtctggccgaggctctggctgccggtcagtctgccgctatctacgacgtctgcctcaagaccatgggtaaggtcggcgtggcactggctatgatcggtgtcgttatctgccccatcacctctggtgatactgcattccgttccgctcgtctgactctggccgactggctcaagatcgatcaggacagctacgcaaaccgcctgaagctctgcatccccgtgctgggcgttggtgctttccttggcatcggcaacgcactgggcttcatcaactacaccgtcatctggcgttacttcagctggaccaaccagacgctggctatgatcgtcctgtgggctgcttccatgtacctgttcaaggagaagaagaacttctggatcaccgctgtgcctgcaaccttcatgagcgctgtgtcctgcacctacttcgtgctggctcccgagtgcctgggcaagatgatcaacacctatgcggacggcaagctggtggcttacaacaccgccgttgcttaccccattggcatcgtctttgccatcgcaatgctggctctgttcctccatgctaccaagaagagctctacttccaaggcataaggaactgacggctccatatttccgtaagtaacttgcgcccgccgctgcctgaccgtacagcggcgggcgctgttttttaaaaatcaaggcttgcaattgcccccgtcccgtgggaaaataggggcgtagaatttaaagcaaagaagggaactacccatgattttcaaacccgcacagctgggcatggcaaagcttgacccgcaggagctggaggcagacaaaaaagcctgccggaagatcggcccctgcggcgtaggcaaaaaggcgctgtacctgaacagcttttacatcgaccgccgctattatctgccatacggcagcatcacccgggtgttcaagcgggtggctatgagctccggcggcttttccggcaagggcgtgtttgcctccatggcgtatcttgtggtggagtacgacggcggcaagcagaagcagtgcaacttcaaggacgagcgggacgtggacgccctgctggaagtgctggcgaaggagcagccgcagctgcatctgctcagcgccgccggagagcaggcgctggagaaaaaggccgctgaaaaggctgcccgcaagctgccggagctttccgaggacgcgcagcacagccttaccgtgctgcgtcgggcaaaggagtatctggacgcaaagccggagctttccgccgagctgagcgctgcccagcgccgcaagcgtgcgcagctgcaaagcaagccggtgtaccgctatgtggcgctggccatctttgtgctgggcgttgcggctgcggcctacggtctgtattccgtgttcagccacaccggcagctacggcgtgtactttgcgctgttcggctttgccgccatcttcctgttttccagctacaatatgctgcccaccgcccacaataacaacaacgccatcatgaagcgtgctgaaaaggccgaggcagccatggcagagtatgtcaagcactacccccacggggcgttcccggtgaaaagctggtacgcccaccccatcgtgctcaagcagatgatggacgccgtggaggagggccgcgccgtcaccgtgcccgaggcactggatgcagtcaaggcacgcctgaaatccttgaacgcggacgtggaggtggagcaggaagaatatgacgaggtggtggtcatcaaggccctgttcctcaaccacgattatcagtaaaacctttcgatagcacaaaaaaccggacagcccgcaggctgtccggttttctgcttttacagggcaggagctgctgttcagaacaggcggcgaagccctatgacacaaggggacttttgaacagtagctcattattaccacttttgaatattgg

SEQ ID NO: 13886 - DNA, 285 bp, Unknown
  gut microbiota DNA sequence
tgagcgccaagcgctgagacaaaagaatgacttctgaagcctcagcaggaagcccttgaaaagaaccaatagacgctgaaaagttccggctgataccgagaaacctgaagcgctccaagttcagaaaagttcaaaagcttctcaaaaaagtgcttgacaatttatcacgaaagtgataaaataagtaagctgtcagccgcaaggctgcggcgcacaggaccttgaaaattgaacaatatcgaaagaacttgtaacggaacctattttcgtgttggaaaaacacgg

SEQ ID NO: 13887 - DNA, 1530 bp, Unknown
  gut microbiota DNA sequence
tcctcgtagctgctggctttcagcacggcgtttttgccgtacttgttcttgatgcccagcatggcttgctggagttttttctccttttccagcttcttggtgtcggtgaaaaagtccacctgatagatgccctcgtccggggtgaccttgttggcgttgagggtgatgcgccgcaccgtcagcgcagggttagtaatgcgctcaaacagctttgcgcttttgttgatgagggtgctgcccagattggtaggggcatcgaaccggacagtgccgtgcgccgctttggggatgattctgccgtagcggtcggtctgggtcagaccacgatagccgcccttgtccacgttctcccggtcgtagcctatctccaaggtgatggattccgtcaccagtttcttttccgtgagtcgaaacatcagaatctccgccatctcccggacgatgagctttgccttatcgttggggtatggacaggtcagcacctgcccctcgctgatgctgttggtgccgggcttgtagcttttgatctgctccatgccgcagggttcgtaaccccatgcgtggtcgatgaggatctctgcatccacgccaaaaatctcatacagacgatcttctccgtggatggaaaaccgtgccaagtcccccatggtataaatgccgtgggattccagccgcttgacggtgccgggacccgtcatccaaaaatccgtcagcgggcgatggttccacagcagataccggtaagacttctcgtccagctctgcaatacggacaccgtccttatccgccgggatgtgctttgccacgatgtccatggccagctttgcaaggtagaggttggtgccgatgcctgccgttgcggtgataccggtgttgtacagcacctcccgcaccatggtcatggcaagctcgtgggcgctcatgtggtaatagggcaggtagcctgtcacatcaataaaaacctcgtcgatggagtaggggtagatatctgccggggacacatatttaaggtaagtcttgtagatttgggtggaaacatccagataccgctgcattcggggcggcgcaacaatgtaactcaaccccagtgcagggtctgcgttcagggcgttggcatcgaaagaggtgctggcaaagtggtacttgccatcctctccccggaccgtctttttctgccggatagcagtttgtagccgctgggcgttgacctctttcactcgctggacggcttcaaacagccgcgctctgccgggtattttatatgcctttaaggagggcgataccgcaaggcagatggtcttttccgtccgggtagcatctgctaccaccagattggtagtcagcggatcaagatggcggtcaacgcattccaccgaagcgtagaaactcttgaggtcgattgcgagataggtgcgctttttgccgtccatcgtcctgtcctttccgtgtgcttatcagacctccacaaaccaccgcccgaagcggctgggaaacgttcggtccgcacgttcaaaaaacaaatgccgctct

SEQ ID NO: 13888 - DNA, 7096 bp, Unknown
  gut microbiota DNA sequence
gtcattttctttgttttcagatacaccctaacaaatggaaaaggagaaaaatcggatgaaacaggtgatcgttacccccaatgctcccgctgccatcggaccctattcgcagggcatcgctgcggggcagaccgtctatgtatccgggcagctgcccatcgatccggccaccggcctgatcccggaaggcatcgccgcccagactgcacagtccctcaagaacatccaggccattctggcacagcaggagatgacgctggccaatgtggtcaagaccacggtgtttctggcggacatcaacgattttgcagagatgaacaaggtgtacggcgagtattttgcgcagccctaccccgcgcgcagcgcggtgcaggtgggcaagctgcccaagggcgctccgctggagatcgagtgcattgctgtaaagtaagttcccccgcacgggaagaaaagaaacggtgaaccaaatggataaacagatgttcgttcgcatcctgaacagtgagatggagctggccaccggctgtacggagcccggcgcagtcgctctcaccgccgcagaggcgggcgcagcactccgcaaggcgggtggcacacgggtagaggccgtgaccgtccgcgccagcatcaacattatcaaaaacgccatgtcggcaggcattccgggcacctcgtatcagggcatggattacgccgccgccattggtgccgtaggcggtgaccccgtccacctgctggaggtcatgaactatgtgccccgggagcagatggaagaagccgcagcccttgtcaaggcaggcaaggtcaaggtagaagtggcacaggtgccgcagaagctctacgttgaggtggttgttactgccgacggccacaccggccgtgcggtggtgcgggatctgcacaccaacgtggtgctggtggagcaggacggcgtggctacgctggacaagcagcacaccgatcccgccgcagcaggggacagcgatgtggtgaccccggagcagatcgcagaatttctgaccgtccgctccatctgggattactgcactgaagagctggaccccctgcacgaccccatcgacatcatccgcagcgccgtacaggtgaacacgaccatcagcaacgagggtctttccaaggaatacggccttgccattggccgcaatctggaactgaactgccgcaagggtctgatgacccgcgacctgaccaccaacgccatggtcatcgcttctgccggtgcggacgcccgtatggcaggcgcgccggtctcggtggtggcaaactccggcagcggcaatcagggcatcacggctaccatgcctgttgtggcaactgcccgctggctggacatcgacgaggagaagatgctccgcgccgtgaccctttccaacctgatcgcaatccgcatcaaggccaagtttggccgcctaagcaacctttgtggtgcaacggttgctgccaccggcgcagcctgcggcattgcctatctgctgggcggcggctaccacgaggtatgctgcaccatccagaacatggtaggcaacgtcaccggcatggtatgcgacggcgcaaaggccgactgcgcactgaagatctccacctgcgtcaacgctgcctgtcaggcagctgccatgggtgtgcgcggcgtgcgggtgcagagcaccgacggcatcgtggagcacaatgtggaatatacgctggacaactttgctaccctgagcacccacggcaccagcgacagcgtgatccttgatctgatgctgaacaaacacctcccggagacggaataagtctccccacccagcccctttccggggaaaagaaagaggtactaaagttatgaaaaagctattcaatagtctgcccttccggcttttgctgggcatttttgttggtatcatccttggtcagatattcaacgagagcaccatgggcgttgtggtgaccctgcagtacatcatgggtcagctcattaccttctgtgtgccgctgatcatcatcggcttcattgccccgtccatcaccaagcttggcaaaaacgcttcccgcctgctagcagtggccatcgtcatcgcctatgtgtcctctgtctgcgcagccttcatgagcatgggcgccggctacggcctgatccctcacctgtccatcgacaacaacgttgccggtctgcgcgagctgccgggcgtcgtctttgagctgaacattccccagatcatgagcgtcatgagcgctctggtgctgagcgttctggtgggtctggctgctacctggaccaacagcaagctgacctgcgactttttggccgagttccagaacatcgtgctggacatcgtgagcaaggtcatcatccccgttctgcccttctacattgccgccaccttctgcggcctgagctacgagggcaccatcacccatcagctgcccgccttcctgcagatcatcgtcatcgttatggttggccactacatctggctggctgtgctgtacctgctggccggtgcttactccggcaagaacccctgggaagtgctgcgtcactacggccccgcttacctgaccgctgtcggtaccatgtccagtgccgctacgctgggtgtggcgctggagtgcgcccgcaagagcaaggtgctgcgtaaggacatggtcagcttcggcatccccctgtttgcaaacatccacctgtgcggctcggtgctgactgaggtgttcttctgcatgaccgtttccaagatcctgtacggcaagctgcccagcgttggcaccatgatcctgttctgcctgctgctcggcatcttcgctatcggcgcacccggcgtgcccggcggcactgtcatggcttctctgggtctgatcaccggtgttctgatgttcgataacgccggtactgctctgatgctggccatcttcgccctgcaggacagcttcggcaccgcctgcaacgtgaccggtgacggcgctctgaccctgatgctgaccggctacgccgagaagcacggcatcgctgatactggcgaccttgaaagcccgatcctgtgataaaaacctgagcactcctccttaattacaagagactgtgaacagacagtcccaaaatctccgaaaagccccggcgaccgcatggccgccggggctttttgtgcggcaacccggtttgatatccggcgtaatgggatgaaatttttgaaacgcctttaaaaccataaagtaaaatgctatactagaaggacattgggtgcgctgaaaatgcgcagtctgaaaggagcttttatgacgcagcttttgattcgtctgtttatacgccgtcccaattctccgcaggatccccgtgtccgtgccgcctacggcaatctggccagtgtggtgggcatggtgtgcaatatcctgctctgtctgggcaagtttgtggtaggtaccctgttcggatctatcgccatcaccgccgatgcactgaacaacctttcggatgcttcctccaatatcgtcagtctggtgggcttcaagctggctgccaaggcaccggatgccgagcatccctacggtcatgcccgctttgagtatcttgccgggctggtggtcagcgtgaccattctgggcatcggcttctccctgctgaaggaatcggtcaccaaggcgctgcaccccaccccggtgcagttcggctggttgaccgtggcggtgctggtggtgtctattctggtcaagctgtggatgagcggcttcaaccgtgccatcggacgtatcatttcctccgagaccctcatcgccactgccgccgacagccgcaacgacgtgctgagcaccgccgccgtgctggtggctgccatcctctgccgggtgaccggctgggacgtgctggacggcctgatgggcgtaggcgtggcggtgttcatcctgatctccggctggggtctggtgatggataccctgagcccactgctgggcgaaagccccagcgaggatctggtggagcatatcgaacagaccgtgatgggttatcccggcgtgctgggtgtacatgacctgatggtgcacgactacggccccggccatcagtttgcatccatccatgtggagctgcccgccgagcaggacccgttggaagcgcacgacctgatcgacaacatcgagcgggactttatgaaaaacgaccatctgatggtgaccatccactatgaccccatcgtcacctcggacgccgccgtgggggtgctgcgcagccgcctgaccgaaaagctgcgccagctggacccggcgctttcgctgcatgatctgcgcatcgtgccgggcaagacccacaccaatgtgcttttcgatctggtgctccccgcgggctatgccggggacaaggtggaactgctgacccagatggagcagttcatcaaagagcaggatcccacctataactgcatcatcaagctggaacaaagctatacggctgcggctcataaatgagggggagccgccccgcacaggctttgcgatataaggaaagcagagggaaagtagtatgctgaacgagacctaccgcgccatgctgaacaacaaaagtgtcatccgcgaaaccttcatgtatggcagacagcgcgctgcccagatcggcagcgagaatgtgttcgattattcactgggcaaccccagcgtgccctgcccgccggagttcaccgaggccatgcagaccctgctggcacaggaagagccggtaagcctgcacggctattgccccagtcagggcgacccgggcttccgcaccgcagtggcggcgcatctgaccgagaccttcggcctgccctacgcgcaaaagcacatcttccccaccaccggcgcggcgggtgctatcgcccacgccatccgggcggtgacccagcccggggacgaggtgctgacctttgcgccttacttcccggagtacggcccctatgtggcgggcaccggcgcagtgctgcgggtggtgccgccgcaggcgcccaccttccagcccaatctggatgcctttgcacagatgctgaccgaaaaggtcacctgtgtgctcatcaacacgcccaataaccccaccggcgtggtctactctgccgacactctgacccgcatggcggagattttgaccgaaaaaagcgcccagtacggacacaatatcttcttggtcagtgacgagccctaccgggacatcgtgtttgacggcaagactgtgccttacccggcggcgttctacccccacaccctgacctgcttctcctactccaagagcctgagcctgcccggcgagcgtctgggttatgtggcggtgcgcccggggtgcgagggtgaggacatccttgtggacatgatgagccagatctcccgctttaccggccacaactgcccgcccagcatcatccagcgggcggtcagccgctgccagaaggtgaccagcgacctttcggtctaccagaccaatatggagctgctgtacgaaaaactcaccgcgctgggctttgaagtggagcgcccgggcggcaccttttatatcttccccaaggcactggaagaggacgccaacgccttctgtcagaaagcccgggaatttgatctgctgctggtgcccagcgacagctttggggtaaagggctatgtgcgccttgcctattgcatcgacaccgaaaaggtaaagcgcagcctgcccgcctttgaaaagctggcagccgcctaccgcaagtaaccggaacgcccctgcatggggcataaaatacacaaccgatagaggaaagggaaccctgctatggaaaagatcaagatgacgaccccgctggtggagatggacggcgacgagatgacccgcattttgtggaagatgatcaaggacgagctgatcctcccctttgtggacctcaagaccgagtactacgatctgggcttgcccaaccgcgatgccaccgcagatcaggtgaccatggatgccgccctcgccaacaagaagtacggcgtgtcggtcaagtgcgccaccatcacccccaacgcccagcgcgtggaggagtacaagctgcacgagatgtggaagagccccaacggcaccatccgcgctgtgctggacggcaccgtgttccgcgcacccattatgatcgacagcatccagccggtggtcaagaactggaaaaagcccatcaccatcgcccgccacgcctacggcgatgtgtataagtgcaccgagttccgcattcccggtgcgggcaaggcggaactggtgttcaccggcgcagacggcagccagcagcgcgccaccgtctttgactttgagggggccggtgtgctgcaaggtcagtacaataaggacgattccatccgcagctttgcccgcagctgcttcaactatgcactggacgtgaagcaggacctgtggttcggcgcaaaggataccatctccaagaagtacgaccacaccttcaaggatatcttccaggagacttacgatgccgagtacaaggaaaagttcgaagcagccggcatcacctatttttacagcctcatcgacgatatcgtggcgcgtgtcatccgcagcgagggaggctttgtctgggcctgcaagaactacgacggcgatgtgatgagcgatatggtctctaccgcctttggctcgctggctatgatgaccagtgtgctggtcagcccggacggtaagtacgagtacgaggccgcccacggcaccgttacccgccattactataagtacctgaagggcgaaaagacctccaccaaccccatggctaccatctttgcgtggtccggcgccttcaagaagcgcggcgagctggacaacctgccggagctggtgcactttggcgaggcgctggaggctgcaagcctgcagaccctgaacgagggcatcatgaccaaggacctgtgcggtctggcagagggcatcacccccaccgccgtagacagcgagggctttatcaaggccatccgtgagcgtctggaagccaagctggcataaaacgattttcaatataacataaaaaccggaacgatccacccgaaaaagggaagatcgttccggtttatgttttgggcaggatgtgcgacaaactggaattgttaatttggaactggtcctataatg

SEQ ID NO: 13889 - DNA, 2184 bp, Unknown
  gut microbiota DNA sequence
cagcaagggtggagaggtaaccgtatattgaacaaaacggcagagcgtattataatgaggaaaaagctcaaaaaggagggccgatcacatggcacaggaatatctgcctgcaccgtccaacgtccgtcttgcggacttgatgaaagagcacaacatcagccaaccggagcttgccaaggaaatcggctgctctaaaagcactatcagccgttttatcagtggcgcaaaaggaaccctgacccatgagcaggtgctgaaaattgcaaggctgttcaacgtgtccacggattttctgctgggagaaaccaacatccccgaccgcaaaaattacgacattgccgaactgggcttgtccgtagaagctgcaaagaacctctacacaggacgtgtcaatacagaggtggtcaacctgctgctggaaaacgctcgctttgcagagcttacttccgcatagcgcagtattttgatgatacctttgcttccggcatcgcagcacagaacgccatactcacgacattgagcaccctgctgcgcacaagggtcaagaccccggaggcagccaaagctgcaaaggacatcagccttcggagaaagccggtgtatcaaggtgatcttgatgacattgaaatgtacttcatggcggcggtcaaggaaatcaaaaagggtatcgggagccattacgccgaacaggaagccatgagcaagaaagtggcagagaagatgttcaccgaattgactaaagggcaggatgtgcagcacccaacgattacggcagagcagttgacagatgcaatgttggacagcgtttcgggcatggaaggagctacgccggaagcgctggaacagctgcggaacggtctgctgggaatcttgcagtctgccgcagagcaggaaaacgcccatgaagcagacgaatgaacggctttgtgcgctggcgcagaaaggcgatgctgccgcgctggacagcctgattgacaacaacaagtcctttattggcaaggcggcaaatgaccttttccgcagcatgaatctggcacagtccggcctgaaccttgacacggacgatttgaaacaggcagggaatatgggcttgtggaaggccgtgccaaagttcgatgcagcgcgcggcatgaagttcttgacctatgcggctcctgccattcataatgccatgatggacatggtgcgggatgcctttactgcttttgagcagcggatggtgacggaggataaggacggtatctgctaccagcgcgtttcgctggacgatgttctgccgggagaagagcagttgcggcgcatcgaagccatagccgacccctacgccatgcagccgcagaccattatggaagagcaggaatcgcgccgggaactgtacgatggtctgaaacggctgacccagcgcgaacagacctatctgttgtatcgctatggcttcaccgatggcgaggagcatccgctgatcggcacggcgatatactttcacctgacaaaaggccgcgccaaaaagaccgaggaacaggctatggataacctgtggctggaattgccgtggtggtttatctgagtgaaaagaaaaatcgtgattgtgctacaagttttctggaaatttatgtgcagctatacgattttgagaaattttgtagacggatgaaacaaaataggattaaatctaagtatctaaggaacgttgatttcacgaagctgctgattaccgactgtaggatttgaggaggatgccgttttatgaaaattacacgagataaaatgtttttttcaaaagatcttattcatacactggcatatgtcggaatgttcgtggcggcaattatatcggttggagcgtgtaagtctggtatttgggtggctgcgatattagcatggattgtagcaggtataattatcggattggcgattatttccgactataaaaaggcagaacttttgaaaaatggaacaagaatcatcggaaaggttacagcaacaaaacgagtacatataaaatttcatatgagtacctaccaccttgccgatgaagatgtaatctatccatatgtggtacattatcagtataaagttaaaggtgaaacctataatggaaagtcgcagtggttttggttcaatccatgtattccgaaaggggcaccaataaaaattctagtagacccaaagaatccggcccga

SEQ ID NO: 13890 - DNA, 1878 bp, Unknown
  gut microbiota DNA sequence
gaaccctcggcgttctttagtttatatagcagcggtcctcaccgggcagcagatagatcgtatccacgttcagcagctccttttcactatgttcgtgtgcaaaccgcacaacacgcaacgtctgctattgtaccatgaaccatcaaattcttctattgacccttgcgccaaaaaggtacaggctttttcgtaggatgtgacgattgacatcctcaaaagcatcccgcagggaggcgcagcctgcattgaaaaatgcagaacaaaggggtttggggcactccccaacaagcattttgcagcgcaaaaaagtgtttttgtatagacgaaaacattgcttgctgggtcacttttcgtccggggcgctgccgctgccggagttcaggatcgccacgaactgctgcagctgcttgagggagctgacacccagtttttcgtagatgttcttgttgtggaagcgcagggtgctgtccttgatgtccagctgctccacgatctcccgggtgcgcagcccggcggcgtagccgtcaaagatgcggcgttcggtcttggtcagggtgggaatgcccgcaacaaaggtctggaaggcatcgggcaccgactcgttgcggcacacgtccgccagccgggacagctcagtctgcatctgctggcgttccagctgcagctcgtccatccgccgccgggattcccgccggtcctcctcgaactgtcggaacgcaggcgagaggatgcgccgatggaagttcatgcagcagaacaccacgaaaaaggcgatgaacaggccgatgagcagcatctgcagattgccggaaaagaccagtctccggtagtctgccatggggatgcacaccgccagccggtaggattggctctcgctcaggcggcacagctgggagatgcccgcataggcgctgtcggggccggtcaactgggtcagcccaccgcccatgctgcgcagcaccagcgtgttccggggagcatggtagtagccgccggtggtgccgctgctgagggcggcatcggcggcaaggccgtcccccgccggggccagcaggcagctcagccggtcaaagccggtgggctgggcaaagttctgcttgaagaagctctcgctgatctcaaagccgcacagcccgtatatcgtgccgtcccgcccccgcaggggcagcaaaaacaactgcacctcctccgaggtgccgggcagctcgaaccgctcggtcagcgtgtaagactggtacagcggggcgctgccgggggtcatccagcggtcgtagtccgggaactggtcggtctggaactccatgcgccatttgcggtggggcatcacgctgtgggtcttgccaacctccgcactgccccggtacagcagcaggggcacggtgggggtgtcggcaccgcttttctgcacatacagcccggcacgggaatgctctgctccctccatgcgggtgttgacggtggcatccagcagcacaaaagcaccggaacagccggtctggcgcagacggcggcacagcggctcgatcatttcctcctccagcgcgttcagcacctcgggggagtcgttcagctgggcaaaggacatctgccgcagagcaagctccttgtccacctctgcgctcatgtcctcggacaggttcacgcccatgaccgccagctggtcaaaatagcgctccatatcgttctggaacaccgaaaactggatctgcagactgcggctgatgtcctttttggtgttgtgcaggctggcaaacaggaacagcgccgcaccaaaggtcaacaccagcagcaccaccagcagcaggcaggcccacagcagccggctgctcatggggctttggcggatcttttcacggtgccggtcaacaaagtgcatca

SEQ ID NO: 13891 - DNA, 496 bp, Unknown
  gut microbiota DNA sequence
ggccgtgttccttcgattcctcgtacgggttgcatgaaaaaatccctgatcctaagatcagggattttattcatgacccgtacgggaatcgaacccatgttacagccgtgaaagggccgtgtcttaaccgcttgaccaacgggccttacaaatacagagcttcgctaaaacctccgactttcatcgtccactactgcggacgaccgtcccccttatcttagcgaaactctgtaacgtggtagcggtaactggatttgaaccggtgacacttcgggtatgaaccgaatgctctagccaactgagctataccgccacatatttagcttgcacttgaacggtgctttattattatatccatagatgccccttttgtcaacacatattttcaaaaaattttgcagttttttgagattctcaatttatttacataggtgcgttgaaatataggatttcttgtcattttgcgggaaaaactcccccagtctcgctgcgctcg

SEQ ID NO: 13892 - DNA, 8099 bp, Unknown
  gut microbiota DNA sequence
cctttgcaatttgggtggtaccacggagtttgatgcacaagcagccttcgtcccttttgggatgagggctgttttttgtttttttctccgtgccgcccctctgccataacagcataaaaacggcgcctgagcgccaaaaacgattgaggagagaaagatctatgcaatggaccggtttgaatgaactgcgcgaaaagtacctgagcttctttgaaagcaagggtcatctgcgtctggacagcttccccctggtacccaagaacgaccccagcctgctgctgatcaacagcggtatggctcccatgaagaagtggtttctggcacaggaggagccgccccgtcatcgcgtgaccacctgccagaagtgcatccgcaccccggatatcgagcgcgtgggcatcactgcccgtcacggcaccttctttgagatgctgggcaacttctccttccaggattacttcaaggacgaggtcattccttgggcttgggagttcctgaccagtgacgagtggatggctattcccaaggaccgtctgcacatctctgtgtacgaggaggacgacgaggcctacgatatctggaccaagaaagtcggcattgccccggaccacatggtgcgtctgggcaaggaggacaacttctgggagcacggctccggcccgtgcggcccctgctccgagatctactttgaccgcggccctgagtacggctgcggcaagccgacctgcggcgtgggctgcgactgtgaccgctatatggagatctggaacctcgtgttcagccagttcgacgccgacggcaagggccactacgagcgtctggcacgccccaacattgataccggcatgggcttggagcgtctggcctgcgtgatgcagaacgtgggcaacctgttcgaggtggataccgtgcagagcgtgctgcaccatgtggagcacattgcaggcaagacctacatgcaggaccccaagaccgatatctccatccgcgtcatcaccgaccatatccgcagctgcacctttatggtgtctgacggcattctgccctccaacgagggccgcggctatgtgctgcgccgtctgctgcgccgtgccgcccgccatggccggatgctgggcatcgaccaccccttcctcgtggatctggtggagaccgttatccagtccagcgagtccgcttaccccgagctgcgtgagcatgacgcctatatcaagaaggtcatcggcaccgaggaagcaaactttgcccgcaccatcgatgccggcatgaatatcctgaacaacatgatcgaccgtctggagaaggcacaccagaagctgctgagcggtatggacgccttcaagctgaacgataccttcggcttcccgctggatctgaccaaggagatcgccgccgagcagggtctggagatcgacgaggacggcttccacgcagagatgaagaagcagaaggagcgcgcccgcgctgagcgtctgaagaagaacatctccggctggagcgaggatctgttcggtgcactggaagccgagcccaccgtctttaccggctacgacaccctgaccgacaagggcaccgttgtggcgctgagcgatgaagagaccctgaccgatgccattgccaccgacgaggaggcaaaggacggcgtgctggtggtgctggataagacccccttctacgctgagatgggcggtcaggctgccgaccacggcgtgctgaacggtgccgagtgcagcctgcgtgtgctggacgtgaaaaagacccccaagggctactacgtccacacctgcgtgctggaaagcggcatcgtgaaggttggcgatgtgctgaccgcacaggtggacaagggctaccgcatggccattgcccgcaaccacaccgctacccacctgctgcaggctgccctgcgtgaggtgctgggcgaccatgtgcatcaggctggttcctatcaggatgcctccatcacccacttcgactttacccacttcagcgccgtgacccccgaggaactggcacgggtgcagaagatcgtcaacgataagatctttgactccatgaacgtcaccgtgcaggagatgccggtggaggaagccaagaagctgggcgcaatggctctgtttggcgaaaagtacggcaaggtggtccgcgtggtggatatcgagggctggtctaccgagttctgcggcggcactcatgtcaagaacaccgcacagatcggcggcttcaagatcgtcagcgagtcctctgtggctgccggcatccgccgtatcgaggctgtcaccggccgcaacctgctgatccgtgcaaacctgcaggaggccatgctgcatgatgtggccaacaccctgaaggccaacaacgtggctgctctgcccgcccgcgccgaggctgtgatggctgagaacaaggccatgagccgcgagctggaggagatgaaggccaggatcgccgcctccaaggtggacagcctgtttgacaatgccgaggaagcagacggcgtgaagatcgcctccgcatactttaccggtactactggcgacaccctgcgcggtatgtgcgacagcatccgcgacaaggccgtgaaccccgtggtggctgttctggtgggcaaggctgaggataagatcaccatggccgttaccgtgaataagctggcacaggaaaagggcctgaaggccggtgtgctggtcaaggagttgtctgctattgccggcggcaagggcggcggcaagccggactttgcaatggccggtctgaaggacgagaccaagatcgacgaggcactggcttctgtgagcgccatcgtcaagaaggctctgggctaaaaagatccatgtccccgcccggtgccggatgcgcgccgggtggcgggcttttgtagaagcaggaaggagtgttcccccatggaagattgtctgttttgcatgatcgcagagggcaagatcccctctaaaaagctgtacgaggatgaccaggtagtggcattctacgacatcaatccgcaggcaaaggtgcatttccttgtggttccccgcaagcacatctcctctgccgctgcgctgaccgaggaggatggtgctctgctgggccacatcttcgccgtcatcgcaaagctggccaaggagcaggggctggaaaacggttaccgcatcatctccaacgtgggcgaggacgcaggccagaccgtgaagcatctgcatttccatgttctgggcggcgaaaaactgcctgtctgattccaatacgaaagggagattttgattatggctgaaacttataccctgcatgttgcaggcctgacccgtgagctgaccatctgcaaggtgaacgaccacatggacattgccgcatttatcatgctgggtgatgccgagctgaccgtggccgctgctgcggagctgctgaagaagtgcccggattttgatatcctgctcaccgccgaggccaagggcatcccgctggcacacgagatgagccgtcaaagcggcaagccctacatctgcgcccgcaagggtgtcaagctgtatatgccggaccctgtggtggtggaggaccagtccattaccactgccggtaagcagaagctggtcatcgaccgcaaggagctggaaaagatgaacggcaagcgggtgctggtggtagacgatgtcatctccaccggcggttctctgaaggcactggacgcgctggcagaaaagacccagtgcaccatcgtgggtcaggccgctgttctggccgagggcgatgcttccgagcgcaaggatatcatcttccttgagccgctgcccctgttcttccactaagccgggatgcgccgcccgctctgcgcgttctgcgccggaatgatgggccttagtttcctgtggacttttttgccgcaaacggagctttttatgccgtttgcggcattttttgttgcctttttgctgctgctttgcatcccgcgccgcagccgcaagctggcgctctgtctgctgctgggcgcactggcggggctttgcgcggtgcatactaccagcgcccggctggagcgtgtccgggcaaattacgccgggcgcaccgtgctgctgactgctgaggtggagcgcgtggacagtaactatttttcggacacagtggacgcgaccctgtgggtagaaagcgtgaacggcagcccggcgggctttcgcatagcctgtgcagagctgcccgcctgcgcggcagggcagcgggtgcagggcgggttcacgctgtcggcaccggatgaagcagaacggacggcgcagtacgcagacggcatcgctttgcaggcagagccgttggcagaaaagccgcagctcaccgtactgggcgaaagcggcagcttccgtgcccgcacccaccgcttgcagcaaaaactgagcgagagcctgcgccgtgccatgcaccgggacaccggcggcgtgctggctgctatgacggtgggagaccgcagcgggctttcggcgcagctgcgcagcgcctaccggggtgcggggctttcccatgtgctggtggtcagcggcatgcacgtttccattctgtgcggggatatcctgagcgttttgctgccctatcgctgggagcagagctaccgcagccgcagacggcgcacggtctggaaaagcctgctggcgctggtgctgatgggcgtgaccggctttacgccctcggtgcgccgcgccgctgtggcggtgtgggtcagcgccttgggcgtgtgggtgtggggaccgccggacgcccttacctcgctggcggcggcaggcatcctgatgaccgccgtcaacagctatgcggtgtgggatatcggctttgaactctcctttgcggcagtggtgggcacggtggcgggcaacgcctgcatccgccggatgcgggacgcccacgacaggcgtttctgggtcaaagcgggggaaaacctgcaaaagccggtcagacgcccgtggtacagcaaattgccgaagggcgtgcagggtcttgtagagagtgcctgcattgccgcctgcgcctcggcggctaccttcccggtgctggtgctgcgggggttgagtgtcagcgcatgggcggtggtttccagcatcgcggtgctgtggatggtgcagccgctgcttttgctggggctggcagtagcttttgttggactggtgccgtggttggcaccggtgcacggcgtgctttcccgggcggcagacctgctcaccgggctattgaacggctgggcggtctggctcagcacaaagcccggggcatccatttactttgataccgcttacgcagcgctggtctgtctgctgctgtgcgggcttggggtgctggctttccgctggcgggtgcgtctgcgggtggcgctgccgggcattttgctggcggcagcggtgggcatcgggctgggcaacgcgctcagccgggacgtggtgcacatcgaccttgtgggcagcgcacaggcacctgcggtggtggttgcccagaacgaccgggcagtggtgctgttccggggcggcagcgccgcccagcgtgcggtggaaaaccagctggcacggcggggcgtgcgcaccgtggaactggtggcagatctgcgcatgaatgcaaaaaccgcctgcaccctgcccgcgcagcagggcatccgggcagagcgtctgccggtcaatgccagccgcaagctgcgctgcaccccggcggcggtggaactgctgcgcacccgggaagggtgtcttgtgcggctgagtatcggcaaccggcagtttgtgaccctgagcggaaaggcagagctggcgcagccgctgcagacagagtggctgatcgccacgccgaaaaagccggagacagtgcagtaccaaaaactgctggcgatgcgcagttacagttggatgacgccggaaacgcagtacacgtcctccctcagcctgcgccgcaccggcggcgaaaggctagggtaatgctttgcaatccgggtcgagtgtggtacaatacaaagagcaatttataacaggaaaggggcatttgcatggccacggaagcaaaactccggcagctggccgacaagggctgcccggtctactatttttattccagcgagcggtatctggtgcggcaggcagtggcggcggcggtgcgggtgctgtcggcagacagcgacgaggacgccacaatcctagacggtgccgccccggagctggaacagcttatcatggcagcgggcaccatctccttttttggcactcggcgcgtggtggtgctgccggaaatagaccccgcagcctacggcagcaaggacttggacgagctgtgcagcaccctttccagcttggaaaacgccgtggcggtgctgggcagcgtgttcccgctggagcgcagcaagctcaagctgggcaagcaggcgcaaaagctgcaagcccagtgcaaggccattggctacacggaggagctggcaaagccccgtccctttgaactgaaaaatctgatgatggagcgcgcaaaggcgcagggcgcgaccctgccggacggcgcagccaccgcattgctggagcgctgcggcgaagacccctttctgctggaaaacgaggtggataagctctgtgccctgtccggctaccagactgtgagcgcctctatggtggcagagatgggcacggtgagccttgaagcggacgtgttcgagatgatccgcatgatcaccgccaaaaacgccaccggagcctgcaaaaagctgcagaccctgctgcggctgcagcaggaacccatcgccattacggcggcgatgatcggcagctatgtggacctgtaccgggtaaagcttggggcggcaaagcggaaaaattacagtgcagtgcacaaggattttggctataagggcagtgactaccggctgaagcgttcggcagagactgccgcccactacaccctgccccagctggaggcctgcttgcaggtgctgctggagctggaccagagcctgaaaagccagcctgtggcggcgcagacactgctggaaacagccctgtgccgtctggcgctggcggggagcggaagatgatgcaaagcgagatgatccataccgaccgggtgctgatcgtggagggcaaatacgatgccgtccgtctggcgcacctgaccgatgccatgatcctgctgacggatggttttggcatttataaagacaaacagcgccagcagctattccgggcgctggcgcagaaaaacggtctgatcttacttacggattcggacgcggcaggtttccgcatccgcaactacatcaccaacatggtgggtgcgcagaatgtggtgcaggcctatgtgcccgccatccacggcaaggaaaagcgcaaggcgcagcccggcaaggagggcttgctgggggtagagggcgtggacgacgcccttgtgcggcaggcactgttggacgccttgggcgcggaagccggtgccgcgccggtgcgcccggcgggacggcagatcacctacaccgacctgtacgagtgggggctttccggcaagcccggcagcgccgagcgcaaggctagactcttgaatgcgctggggctgccgccgcgcctttccaaaaaggaactggtagaggcttttaaccggctatatacttttgaacaactggacgaattgcagttgaaaattttgcaggagtaaaaaactagctgtgtttgccccacgcctgccgcagcagttccagcgcgtgggtctccagccgggaaacgtagctgcggctgatgcccagcagcccggcggtctccagctgggtcagaggcggttgcccggccagcccgtaccgcagcagtaagatttgccgctcccgggcgggcagagtgtccagcagctgccgcagccgccggacatcctcctgccgctcacagctgtcctccatgcaaaagccgtcctgtatcacgtctgctaaggtcagcgccgagtctccgtctgcctccaaggcttcttgcagagagacggtctgcccgttcttgcgctcccgccggaactgcatacggatctcgttttcaatgcagcggcttgcataagtggaaaaccgcgccttgcgtgtggcatcaaaggtatctaccgctttcatcagcccgatggtgccgatggaaacaaga

SEQ ID NO: 13893 - DNA, 445 bp, Unknown
  gut microbiota DNA sequence
tgtatagaggggttagaccacaaccctcacatgacaccctctgaagcagaaaaaaggaaccgctctctcggctccaaaaaatccattttgacgtagatgcgtcattgcgtgaaagaggtggattctcttttccatcccaaagtgcgctggggagaggatagcattttcaatgcagcggctggcataagtggaaaaccgcgccttgcgtgtggcatcaaaggtatctaccgctttcatcagcccgatggtgccgatggaaacaagatcctcttgatcacccggcagggcgtaatatttttttacgatgtgcgccaccagccgcagattgtggcggatcagcttttcccgggcggcggcatctccggcgtgcagggcgctgaaagcggcggcctcttcccgggctgtgagcggacgcggaaagcagccgctttccagatggagcgcc

SEQ ID NO: 13894 - DNA, 4179 bp, Unknown
  gut microbiota DNA sequence
atgcgccaccagccgcagattgtgccggatcagcttttcccgggcggcggcatccccggcgtgcagggcgctgaaagcggcggcctcttcccgggctgtgagcggacgcggaaagcagccgctttccagatggagcgccagaaacagaaattttgtggcgaaaaattgtagtaaggtcagcagcacacgatatccctcccggtacatagttgttagattgtatgagccggggcgcggatagttgccggagaagccttttgtgcgcagcagcttttctgcaggggaaaagcgtggtatactgagggggataactcgtaatttgtggaggggagcctgatgaaagaaaagacttgtcaaactcggtgcggaacgattcggtattgggtaagtgtgtcaaacccggatacaattacgcttgtttttctgccgggattgactgcggatcatagattgtttgataagcagattcagtattttgagagcaggtataatgttatcgtctgggatgcaccggcacatgcttcttcatggccgtttcggtttgattttgatctgttcgataaggcaaaatggctgaacgatatcttaaaccaagaaggaatcacaaagtctgttattgtcgggcagtccatgggtggatatgtgggacaggcttatgcacagctttacccagacaaaatgacaggctttgtctccattgactctgcaccgctgcaacgaagctatgtgacggcagttgaaatttggcttttgaaacggatggaaccggtatatgctcactatccgtggaaatggctcctgaaatcggggtcggaaggcgttgctacgtctgattacggtagaaatctcatgcgtgaaatgatgctgacttatgacggaaaccagaaacgctatgcacaaattgccggacatggttttcgtattttggcagcggccatagaaaagaatctgccgtatgagatcaaatgtccggcgttgctgatatgcggcacacaagatcacgcaggttcgtgtatacggtacaacaaagcatggcatcgcaatacgaaaatcccattgatgtggatcgaaggagcagggcataattccaatacagacaaacccgaacagttgaatcggctgatagatgaatttgctgcaaatattttataacaggaaacttagcaattcaaccttttaatacagcagcaacagcgttgaattgcgtatcgcaaatatgctgtttgaatgttgcactaatttcttgacttgtgattagaaaagttcaccgcaaaacacacttcgggaggtgcgaggaatgaacttctggaaaaagctgtttgccggcatgggctttgtgtgcggctttctggtctttgaaaccatgtcgctggcgtaccacaactcccgccgccgtcataaaaaccgtaaggggcgctgccggcgtaatagtttttgggacacgcttacccggtacatgatctttgcgtggatctacgatggtgtgaagaaaagcagggaacaggtgggcagacggtactaccgccgcaccgggaatgagttccgaccatcctacgattccggcacaagaagcaatccctctgaacctgcaaaagccgccccgaaaaccgcagatgcagcacagtccaaaaagcagcggccgtctccgtctgcgccgaaaacgacagcaaagagcgcatcggcacccacggcagataggctgaaagtccctgctgcggaggcaaagccgccccgtgaaacaacggtgaaacctgcccctgcggcggaaaagcctttgctggataccgaaaacctacctgccccaaagccaaaaacgccgcaggaggtggaagcggagcatcagcagatgcttgcacggctgcgcaccgagctgcaggagcaggtctgcgccattcatgcagacgtgaccctgcagcccgacagggagcagggaagcgaggcaacggagcagcagctgcacattctgctgtaccagaccgatgtaccggaggcggagctggacgccgccctgtccgacctgcgtgcccagcgcaggcgggaaaaagcccagtatcagggcgcaccctttgcggatgtgtttcaggtggagctgattttatcggaggaggacagcgaccgggcctgcatcgtggatgtaggggacaccggcatgagctatgtgattccgtggagcagcatcccgcaggagcttcagcagccgctgcgccgctatgtggcacaggcagacggaaagctctgcggctattgcaaagaggacctctgcaacaccgaaaacggacgaatgatcgtggagctgtatctgggtaaacagggacatcacgtttcgaggatattgtattgaaatagctgcacaaccgcagctattgggttgaaaataaggctgaagccccaattgctccagccaatgtcagagtttcttaattgttcatcaaaaatacgttggtacgttttacactgtgacgattcaaaaaacagaggagaaatgttttactatgatctacaaaaagcaatacggtcaaccgtttgataccgaaagtgtagtgggttcttttttgcccatgatggaaacgataccctatctgaccaaggagccggatggtttctcctatgccatggagccgcaggatgttctgtatggtcttggcgaaaatgtccgtggtatcaacaagcgcgggtgggtgtacgaaagcaaatgctccgatgacggcaaccataccgagggcaaatcctcgctgtacggtgcttataattttatgatcgtgtccggcaaggatacatttggcgtttttatcgactacccgggcaaggtcacctttgactgcggctacaccgacatggataccttacgcatcacggtggccgaggaaaattacgatttctacatcattgagggcgaaagcctgaccgatattgtgcaccagttccgccagttggtgggacgcagttatattccgcccaaatgggcttttggcaacgcccaaagccgctggagctacatgaacgaggacgaggtccgcgaggtggtggcaaattaccgtgccaataatatgccgctggacgctgtggttttggatattgattacatggagcattacaaggactttacggtggatgcgcagcgtttcccgcattttgcagactttgcagccgagatgaaagcgcagggcatccatcttgttcccatcatcgatgcaggagtcaaaatcgaagatggatatgatgtgtacgaggaaggcgtgaaaaacggctacttctgtacgaatcaggatggcaccccctttgtagccggtgtgtggccgggacgggtacacttccccgatatgctcaacccggaagcccgcgcttggtttggcagtcaatataaagttctgctggatcaggggatcgagggcttctggaacgatatgaacgagcctgctatcttctacgcagaggaaagactgaaaaagacctttgctaaaattgaggaatataacaagcaaaacctggatatttccagctttgctgcttttaccggcatggtggcagagctttccaacaacgaaaacgattataagctgttctaccacaacaccaagcagggacgtatgcggcacgacaaggtacataatctttttggttataacatgacccgtgctgcaggcgaggcttttgagcggctggagccggacaagcgcattttgatgtactcccgttctgcctgcatcgggatgcaccggtatggcggcatctggactggcgacaaccattcttggtggagccacattctgcttgcgctgcacatgatgccctccctgaatatgtgcggcttcctgtacgaaggccccgacattggcggctttggcagcaataccacggaggatctggtgctgcgctggtacggcttgggcatcttctctccgctgctgcggaaccactctgccaacggcacccgccggcaggaaccctaccgctttaagaacaaggccgcctttgccggtattttacaactgcgctacctgctgctgccctacatttacagcgagtacatgaaagctgctctgcacgacggcatgtactgtatgccgttggcgttcgccttcccggaggatgactttgcccgccaggtagaggatgaggtgatgatcggtgaaagcctgttgatcgccccggtatatgagcaaaatgcccgaggtcgtt

SEQ ID NO: 13895 - DNA, 3760 bp, Unknown
  gut microbiota DNA sequence
gtgacctttgcatcggtgacctcgagtttattcgtaggagtaacgaactccgccttcaggttcacatcatggtcgggcatggtgaagtacaccacgcgtgcggtgctctgctcctcggtcagctccagaccggtgcagttccagctcttgaacacgctggtctcggtgtcctcgtctgcggtagccttgagttctgtacccacggacacagctgtcaggtcggcaacagcgctgccatccttcagggtgacctgtgcatcggtgacatcgagtttataggtcttgggagcgttctcggtgtactgtgctttcagtgtgacgttatttgcgggcatcgtgaaggagatggtcgccttggtggtgtccacgtcagtgggcagaccggtcactttccaaccggtgaaggtgtaaccgtccttctcgtctgcggtgaagctgagcttctcacctgcaacgtgctcggtagacttgtcgtccacggtcagggtgtacttcgactcagacacagtataggtgtccacttcgtactggttgccaacgtagtggtcactagaatccaccacgatgtcaacgctgtaagtgcctgccttggtgggcttcgtcacagacgggaacgagccatcctccgggacataccggatagaatacagcggtgcatcgtcaaaatacatcgggcctttataggttgcagtttgggtcttggggtcatactcaaagtcgtcgagcttcggttgatatctgcgtaccacctcgccgatatcaagcgagccttctgtgtacttgtcgccctcttgcgctacgatgcgctgcttgtagaggccgtacatgtccgctcccgccgggtaggtttcaaacacctcgttgtcgtaggtgcgcacatagacgaggctcaatttgcccacgccatccttgctgcttttaacggtctgatgttcgatcgtcccggaaacggtaaagtcgctcttgctcagggaagagaagggcagctttccggtggtggccatgttcaccacaataggctcaccgtcattcttggcggtcagggtcagggtcttgccatctgcggaaagctgtgcgccgttgtaagcgctgacatcctcgccgttgatgttcgtgactgcattgctgaagcggatctctgccttgacattaccgataaggtaaaccgcgtctgttgctgcggcatagtcgttgaggcgttccacagtgccgtccgtcatcatcagcttgctctgctgctgaccggcggcaaggaatctgctttcaatatagccgcagctcaccgtattggaaatagcagccttgctgtcgctgtccgttttcaggctgccaaggatcacggcattctggatgaccgttttctccgtggcatagctcggcagctggacatcgtggaacacaccgccggtgacctcgctgttctggttcagctggacctcagcgatgaatgagccgccagtgatcttgccataagcgcggacgacatcctggaaagtgccgcctgcgatggtgctgttttcatccatgtagacatccttctggaaggtgccgtcctgaatgatggtgttctccgcaccaacagagccctctgccacgatgccggtgacagtcacatttgcaaaagtgatctgctccacggcaatggccttatggtaggggttgatggtatccgaagaaagatccaccgggttgccgtccggggtggtgatgtaaagcgccgcgcgtgtccttccgttctcttccatggtggcgtacttccagcccaggccctcatagaggttagccgtcatgccctcgccgctcatcggcacaccggtcacaccggtcaggtcgggcagacccttttcggtaatgcgcaggggcttgaggtcgcttggatcggtggacttattcacaaagatctttgcgccgtcattcttgccggtaatgcgcagcaccttgccgtcggcagaggtgttggcgttgtagttttcgaccggtgcatcgttgatgctcagtacatcggtgttcagggtaagttctgcgctgcctgcgcccaccagatagatggtattggtggaaagaggcagagttctgccgttcatcgcagtcacaccgccgttacgcaccaccagtgtgctgagctgctgtcctgcgggcagcagcttctggatgccgtcaggcagttcgcccagaaccgtatccgaaatggtgtaggtgttattgccataggtattgaaattgcagctctggatcaccgcattggcaatagagcaagagccattgcagaacagggaatcaaaggtgccgccggtgatctcgaccgcactgttcccattgatcgagttgatgcccgcgctgacattgtggaaggtgccgccgctgatcttaccgctggtgatcgtcagtcggccgttttcgccaaactcaccgccggtaatattagcattggtgatctcgacatagcagttgataggcacatcgctcagcgcgctgaagtcgaagtttgcaccgccctgattcaggatctgcaaagtgctttcattgctgctgtcgttggggtagcagttataaccccagccgttgcccatgtaaacacggtgcagctttgcgtccgtgtccagactgtccacataggtcacgtcggtcagatcgggctgaccctcattgttaaagcgcagttctgtggcgccaagtgccataggaaccagcttcatgggtgcgccgttctgcgccgggatcatgttaaagctggcggaaagcgtttttccgtctgcgctgatggagatcgtggcaatcgtagagtcaaagtatgtgaaggcgtaattttgggtaccggcgggcagtgccatgacactgccgccggtagaggctaccgcccatacatcgcagccggtgtcgctttccactaccagttccagatcgttcccgttaccggaatagttatacttcttgatgatatagatttttgtttccttttgtccgttcagggtgcagttctccggcagcagcagctggtgtgcctgctgctgcgtgtcggcgctcagaccggagatatcgcggaaaaagccgccccggacattgccgccgttctcggtcagcttatcgtaggtaccaccgtcaatggtgcccaaattcagttgcacatcggcgtagctgccgcccagaacgcggacgccgtacatattgtcggcttctatcaaaagtgtgccggtgacagtgccatccagcagataaaccgtgtgactattagcattcttgacggtcacattgcagctgaccgtgccgtccagaatgtactcggtatcttcactgccggtaccggtgatggtcagcccggtagtttcgtcataactccagccggtaccggacgctgccttgggcagaccgttcgtgccgacctcgatcttgaccacctgattatttgtttcagagttcttaccaacagcctcatgctcttcttcggagctgtaagtaatgctgttggtttcttccgccgctgcggaagaaaaccctgcccctgcatctgcaaatgcggatacaggaaggatggagagcaccatactgagtgccagtatcatgctcacgatgcgttttttcatgatatcctctcctttgtcggttgatttgtccggctatacccccaaacggcacagccggaacggacaaaaatgccaagttgagtatagcaccaaaattcaaggaaataaagcgcttttgcgggcagcacctgccaaaaaatggcgcaaaattatgggcaaaatcacgatacggggggggg

SEQ ID NO: 13896 - DNA, 4428 bp, Unknown
  gut microbiota DNA sequence
atagcggcgggcattcaaaagcgttttacttgcccgccagcagcaccgccagcacggctttctggacgtggagacggttctctgcctcgtcaaagatctcgtccgcgtgctgctcgaacagggcggtggagatctcctcgccccggtgggcgggcagacagtgcagcaccagcgcgcccggctttgcgttttccagcagacggccggtgagctggaagcccacaaaatcccgcagacgctgctcgctttcagccgtgccgggggcggtggtgttccacgcggcggtggctacaatgtccgcgtcccgcaagccctcggcggggtcggtggtcaggtggaaggcattgccgtagcgctgcgcaaacagcagcacatccgctgccgggcggtagcccgggggacagacgcaggatacctgcatccccgccagcaaaccgcccacgatcaggctgtttgccatgttgctgccatcgcccacaaagcagagtttcagccctgccagcgtgccccggcgctcccggatggtcatcaggtcagccagcacctgacaggggtgggcgtagtcggtcaggccattgatcaccggaatgccggaaagctccgccagctcttccaaatcccgctggcggtaggtgcgccagacggcgcagtcgtagtagcgccccagcacccgggcggtgtcccgcaaaggctcgccgcgcccggcctgcaattcggcggtgttcatgtagttgccaagaccgcccatctgatacacgcccacctcaaagctggtgcgggtgcgggtggatgccttggagaacagcagcgccacgcttttgcccgccagcagcggctcggtgcggcctgccttgcagtccgctttcagctggtctgccacatccagaatatgggtcagctcggcgggggaaaggtcgctcattttcagcagatttttcatgcctgctccttcggagcggtcggctccatcgtgcccagcacctcggccagcacgtccagcgccatatctacctcgtgttccgagacggtaagcggcggcagcagacgcagccgggtcttggcggtaagcaccagcaagcccttttcgcggcaggcagccagcacatccgcagcctgcacgtcaaagaactcgatgcccaccatcaggccgatgccggaaatgttcttgacgtggggcagctttgccaagccggtacgcagctgcacggcgcgctcgctgacctgtgcaaggaagctctggtccagacgatccaccaccacgttggctccggcgcataccaccgggttgccgccaaaggtggagccgtgggtgccggggcccatgccctcggctactttttcattcatcagcaccgcgccgatgggcagaccgccgcccagccccttggcaagggtgacgatgtccggcttgaggttatagtgctcacagcacaggaaggtgccggtgcggcctacgccggtctgcacttcgtccacgatgagcacaaggtctttttcgtcgcacaaagcgcgcacggcctgcacatactccgggtccagcgccatcacgccgccctcgccctgaatgagctccatcatcacggcgcaggtgtggcggtctaccagctcccgcagcgcttcgatatcgcccgccgggacgtactggaagccctcgttgaaagggccgaagtagttgtggaacacctcctgcccggtggcagtcagggtggcaagggtgcggccatggaagctgttgaccagcgtgatgacattgtagcggtccttgccgtaatgatccacgctgtacttgcgggcggccttgatagcgccctcgttggcttcggcgccggagttgccgaagaacaccttactcatgccggtgcgcttgcacagctttttggccagcttgccgcagggcgcggtatagtagaggttggaggtgtgctgcagcttgtgtgcctgctgggacacggcttctgcccatgcaaggtcgcagtagccaaggctgtttaccccgatgccgctggtgaagtccagatacttctgtccctcagggccctcggcgtacagcccgtgccccttttccagcacgatggggctgcggttataggtgtgcaggacgtactcgttgtcccgcttgatgactttttcagaatccataggtgtacctcctgtgaatagaagttccgcgcatgcgccgctcccccggagggagcgttttttctattataatactgctttttcgcttgcgcaatctttttattcgcggtggctgcggcggtaaaagcgggtaccggagccgcggtcggagaacagttccagcaggatggagtgcggcacgcggccatcaatgatgactgcttcgtgcacgccctgatagatggcatccgccatgccgccgatcttggggatcatgccgcccgcaatgatgccggcggacttgtagccctcgatctcggtcacttccacctcggggatgagggtggtctcgtcctccttatcccgcagcagacccgcgatatcggtcatggacaccagcttttcggccttgagggcaatggcgatctgcgccgcggcggtgtccgcgttgacgttgtacgcctgcccgaggtcatccatgcccacggtggcgatgaccgggataaagccgccgtccagcaggctttcgatcagggtggcgtccacatggacgatctcgcccacatggcccagctggggatccagctcagtgcagcggagcatctgtccgtccatgccgcacagacccacgccgcgcccgcgcagctttgccacaaggtccttgttcaccttaccggccagcacctgctgcacgatctccatggtggcatcgtccgtcacccgcagaccgcccgcaaagtggctctccacgcccaccttcttgagcatctcgttgatggcggggccgccgccgtgcaccagcactacccgcacgcccagcagcgtcagggtgacaaggtcgttcatcacggcgtttttcagcgtctcgttgatcatggcgttgccgccgtatttgatgaccatggttctgccatggtacttttggatataaggggtggcttccgaaaaaagccgcgccatttcttcgtttttcatctgtttcgcgctcctgtcaggttctgtaatcgccgttgatcttcacatagtcgtaggtcaggtcacagccccatgccttggcgcttgcatcgccggtgcccatatccaccttgaccagaatatcgtgctcagccagcaccttggcggcttcgtcctcgctgtaagggtggtaggcggcgttctcgcacacatacacctcgcccgccttgctggaaagccagacgcagaccttatcaatggagaaatccccgggggtgtagccgatggcgcacaggatgcgtccccagttggcatcgcggccaaagaccgccgccttgaacaggttggagcagaccacgctgcggctgacggcgcgggcggtcttgaggtcgggcgcatgggtcacctcgcaggtgatcaggtgggtggcaccctcgccgtctccggcgtgctcggcgcacatatgctctgcaatggcggtcagcgctgccacaaaggcggcgtagtccgcgttctcctcgcagatctccgggttgcccgcaagaccggatgccatgatgatgagggtatcgttggtggaggtgtccagatccacgctcatctggttataggtgccgggcaccacggtcttgagcgccttttccagcagcgcgggcgagacggcggcgtcggtggtgtagaacgccagcatggtagccatgttgggggcgatcatgccgctgcccttgccgatggcacccacggtgcacaccttgccgcccagctcgaactggatggcgtactcctttttatgggtgtcggtggtcatgatggcagtggcggcgtccgtgctgccctgcgcggtggcagccagcttttccgccgccgccgggattccccgggcaaaggggtcgatgaccatgggctgaccgatgacgccggtggaggcgggcagaacgtccttttcgtcaatgttcagcgccttgcccaccagtgcacagcactcctcggccagtgccacgccgttggcggcgcaggtattggcgttgccgctgtttaccacgatggcctgtgcatagccatcggtcagatgggcgcggtccaccttgatgggcgcaccgcagaccttgttggtggtgtacacgcccgcagcggcgcagcgcacctcggccttgatcagcgccagatcgtatttttcgctgtgatttgcccggatgccgcaatggacaccggcggcggcaaaacccttgggcgcgcagatgccgcccgcaacttccttatactgcataacgattttcctttcccacaaagaaactcttttcacgcaaacaggctcgccctctcaggcgctaatgcgccagattcccctttttgtcg

SEQ ID NO: 13897 - DNA, 1445 bp, Unknown
  gut microbiota DNA sequence
ggcgcatccgcagcctgaccgatgtgcccatcctgtttctgagtgcccgcaccgatgaggccgctgtgctggaagggctgggcatcggggcagacgactttttgtccaagcccttccgggtggctgagctgcgggcgcgggtggcggcacatctgcggcggcagagccgcaccccggcgcaccggatggtgcgcagcggcgtggcctttgacctgaccgcccggagcgcggcggtggaggggaaggcgctgcccttgacccgctcggagtattccatctgcgagtatctggcgctgcacgccggacagacctttaccaaggagcaaatttacgaagcggtttttggcattgatggcacagcggacgacaccgccgtgacccagcacatcaaaaatatccgggcaaagctgcgggcggcaggcgtgccggagccggaaaagctgctcaataccgtatggggcgtggggtaccgatggaaaagcgaagactgacctctctgcgcagcgtgctgctgcaatatctggtgcgcacggcgctggcctgcctgctggtcgcggtggggtggctgctggcgctgatgctgtggatccagaacggcgagttgtttcttcccgcgaatcaggctgcacaggcctgccagaaagccgcacaggacgttttaccgggcatgaccgccgtcacctttgacgagacgcagctggactccttgtgccggtacgccctgtttgccgcgccggacagcagcgaggtgctggccaccaacatggatgccgggcacttgcagcgggcaatggagaactggcaggggaaaacccactggcattttggctacacgcagtattatatgacgtcaaaattgcaggacggaacggtttgcctgctgcaatttgactatgccgtgccctacgccgaccctgcgctgcggggtgtgctgccggatatgcagaccgtgcactgcattctgggcattctgctgttggtaggcgcggtggtgtggagcacccacaggaccgggcgcttcctgacccgggagaccgaaaagctgaccgccgcagcacaggcggtggcacggaaggagctggacagcgcggtattttccggcgcgaaggtgcgggagtacgagagcactttacaggcattgcagaccatgggcgacgccctgaccggcagcctgcagaagcagtgggccatggagcagcggcagcgggagcagatcattcagctgtcccacaagctgaaaacgccgctgaccatcatcgagggcaacgcggaactgctggcagaggatgacgatttgaccgcagagcagaaagcgcaggtagagtctattttgcagggcgcagagcagacccgcacctatcttggcaagatccgcgccgaggtgcagaccccgctgcggtataaacgaaatgcagaacaatgacaaaataaacgatttatagctg

SEQ ID NO: 13898 - DNA, 391 bp, Unknown
  gut microbiota DNA sequence
ataggattgcggcttgtccatcatgacctctgcgaatttgaggtactcttcctttgtccagaaaagcatttccttgtgcttttctgaccccatgcacccggctgtggctgctgcgtttgatttcagcccgtagaaccggactgcgtgattcagaatggcactgagttgtccatgcagcgtcttgaggtaggtcggcgagtaggccttgccgtttttgtcccggtagttcagcatctcgttctgccatgcgatcacatcccgtggcttgatctcgctgagccgcttttctttgaaatacggtaagattttcgttcggatgatgtgctctttggtagaccaggtgttttcccggagtcgctttttcttgtccgtgatataaatttccacgaac

SEQ ID NO: 13899 - DNA, 614 bp, Unknown
  gut microbiota DNA sequence
atcacccccgcatcgctaagtcgtgattagtttggttttgataggaaagctgcatcgtggtgggtgcgttgtacagagaagcgagcaggtattgtttcatgtttcggatcgggctgctgttctctgcaaggcacttcagcacaaagcggatatggtcagcgttcagcttcataaagcgactgcgtaccacctcggcgggcttatcgtccccggcaatgcgcagcagcttgcggttggtagcgcaggtgtccaccaacaaatctacgatctgatagatggtatcctcatcgtccgggcaaagtcggagcagaaggtctatctccaaagactgagaaaaatattcttccagttgggtgcgtttgctcatcccatccgcttcttcagaatagaatggatcagtctcactcatttcagtatcattctctttagtcttattacatcgtgattttgaagggtcttgacttgcgtttttgaagcctccagaatcgtgaaaatcacgattctggaatattgattttgacgattctgctgaaaagttcttcacatacaccaaacttggctttcccagacctctgcgttttcgttcaatcagaccaaacttttcgagttcccgg

SEQ ID NO: 13900 - DNA, 323 bp, Unknown
  gut microbiota DNA sequence
tgacagggagggattgggcatgagtctgaaacctccgaaaaagagtgaccttggaaaaagctggatgaagaatcgccgtgataaggcgaggatgattcagccggaataccacttgattgcatctgaaggtacagaaaccgagccgcagtattttggcgcaattcaacggattatcaattctaagtaccgtgatagaatccagctaaaggtagagggcattggcgacaatacggtgaatctgttgatgaaagctcgtcaatacgttcagaataacggcattgtgtttaagcacgtctggattgtctatgacacagatgattttc

SEQ ID NO: 13901 - DNA, 1523 bp, Unknown
  gut microbiota DNA sequence
agatcaccacagccgagatgctgcagtgcatggagctggacccggacgaagtgcaggcgcaggtgcagcggcaggccatgcaggcctttgaccgggagatggcgcagggtgcgtattacgatagcctgcgtctcggcggagagctctcgcaaatgcggatggatacgctggaatacaatgagctggaaaacctgtgcctgcttttgccggagcaggatcaactggtgctccggggaaagtacagctgcgaagaaggctggcagcagctggatatggagctctcgctgccccccactgacaccccggtgctgaccgacacctacgatggtgtgcaggtgcagctggagggaacgcaggccaccatcaccctgagccccacgccaaagaccgaccaatggggagacattggcatccgggtggaacaggagcacagctaccccatccttggcgcttataacgagtatgtggacgtgtgcatcggggagcaggaggacggattcttccgcccggtggtctatctgctgaccaaggacggcgtggtggagtatgtggacgtgctgcgctgcctcatgttcggcaatgccatggtctgtcaggaccccatctactttgccaacaacggtgtggcgctggaactctgcggcagcgaggtgaacctgcgccgggcggatggctctgtactggagctggctcccctgtcggcagagtggagcgcgcaggaaattccctattccgtcaccggctcctacaactacacctctgaaaacggctggaactggatggatctgggcagcgacggcagcgttcagctgggcgtgcaggacaacagccgcatctatcggggcgatgccgcgtatctgggcgttgtgcccgagggcgtggtactgggcatcgctgccgataaggagctcggatttgtggcggcgttcaagaacgacctgtacaacgagaacctgaccctgaccatgatcgccgggcaaaacccctttgccgagggcgagacccagctgcaattgacccgtagctacggctgagaacacaggagaaagaccatgaaacacaaacgccttgccgctgcggtgctggcggcggctctctggctgaccggctgcggcggcgcggcggctcccgctgcccccgcaggctccggcgcagctgcccaaagcaccgcagacacggcggtgcagacagcacaaaaagaccgcatcaccgagcagttcacgctggaaaagaccatacgggacgagtacggcatcacccagaagctgaccatccatgtgccgcagcttgtgtgcgacagcccggacgctgcctatctcaacgaggagcttgccgccatgtatgcggcagacttccgacagtacgaggacagcccggagatcgagccgcagcaggacgagtggagcccggagatttatatcaactgggacgcctactggtacggcgactgcgtaagccttgtggtgttccgctacgacggcggtaccgaccccatctattctcagggctggtgtttcgatttt

SEQ ID NO: 13902 - DNA, 650 bp, Unknown
  gut microbiota DNA sequence
cagacctttgaccggcacatggcgcagggcggctactacgagggcctgctcagcggcggcaatctggcaagcatgcggatgaacacgctggaaaacaaccagctggaggacctgtgcctgctgctgccggaacaaaaccggctggtgctccggggcgggtgcagctccaccgccgggtcgggctggcggcagctggatgtggagatcccgctgcaggctgctgacccgcagccgcagacggtgctgaccgatacctacggcagcgcttcggtgcagctggaaggaacacagggcaccatcaccctgcgccgcacgccggagaccgccgcgtgggacacggattacggcatccggctggaacaggaccgtactttccccatccttggtatctataatgagtatatcgacctgtgcatcggagaactgggcgcctccttccacccggtggtctatctgctgaccaaggacggcgtggtggagtatgtggatgtgctgcgctgccttatgtccggaaatgttctggtctgtcaggaccctatctatattgcaaatcagggcgtggcgctggaacgcagcggcgaagaggtaattctgcatcaggaggatggctctgtgctggaacttgctcccctgacggcagagtggaacgg

SEQ ID NO: 13903 - DNA, 4052 bp, Unknown
  gut microbiota DNA sequence
cagcatgtaatggagcatctgacgcagctgctggccggtcaccttgaacatgaatacgccgtcatcgtaggggaagccctcgataaggtcgccgtaggtaacgatggggcccagcttttcggcccggatgctgccggagccgatcagcatcacatccaccccaaggctgcgggtaaagatatcggcaaacaggttgccaagctcggtctcctgcgtgcgctgggggtgggtaagctcccggcggaagcgccctacgatgtggctgtacttttcgtccacctgactggtgaagcggtgcagcacctgctccatggcagggttgcgggggcaggtctcggcgcagatgggcacggtgcgccatgtgtaggaatcgatgcagttgttgtccgtgtccacgatgatgtcaaagcgcccgatctggtcggtgccggtgcccgcctgcgcaatgaccacgccgttttcctccaccgcgtgctccggcagggtgtggctgtgcccgccgatgatcagatccactccccacgccgggtccagctggcgcgccagatggcggtcctcctcaaagccgatgtgggtcagcagcacggtaaaatcaatatcgatgctgttgtgggcgttgcagatcttgcccacctcggcggctgctgcggcggtgtccacaaaggagcctaccagagattcggatttggtctggttgatcacgtcctgcgtgatgatgccgatgaacaggatgttcatgccgtccatccgcaggatcttgtagggggtgaacagccgggtggaggtgtttttgatgtagaggtttgcgttgatgatgggaaagcgcgcgcatttttcgatgaacagcagatgcgcgatgccgtagtccacctcgtggttgcctatggtgaccacgtccggggcaagggcgttcatgatctcgatggtggaaagccccttgtattcggaatcaatgaccgagccccggaacatatcgcccgcaatggcgtagatggtgttgggctgttctgcccgcaccttttcgatgtagccggacagcatggaaacgccgcccaccagtttttcgtccacctgctctgccagaaagtctccgtgcagatcattggagtggaggatggtgatcgttttggtgtgtttcatggtgcattcctcccggtgtgggtcggcgctggtcagcccatggcctcctgccgtgcaaagtagaccgtgttgacaaggctcaggtagctctccccgccgtccagatagaacttcagggcaagggtgtcctcgtcctccagcgtgacggcgtagcggtcgccgtggggtccggtaaaggtggcgtaccactcctgattggagcggaagggtacctccggggtgccctcctgatagaacaggtcggcttcctccacgttcagctccgggtagggggtgatgtagctggcggtgaaaggcagctggctgccctcggtgtcggcatcggtgggcaaaaagcacatccggtcggcgtctgcggggtcggtgtcaaaatagccctcgtcggtgtcgcggccggtctccagccagttaccttccagcgaccacgggctggtgtcggtctcccagtcgtccccttccgggtagatggtaaaatcgcacacgccctcggcttccaccacatggccgttctcgccggaaaggaaggggctgaagaccagctcttcgccggtgctggggtacagctccacctcggtgttggggacgatatcgctgatgttgcacagcagcaggatgggctgaccgtcctcactgtaatagagctgtttaccgcgctggagcgggttttcggcatcgtctgtcaggctcgtctcgtagacgaacagggtggcctgcgcctcctgcgggaagatgcagtacaggtcgcacccgccatccggtgccacgacccagtgatcctgcgggatgtcatagacgaagccccacagatcccgcagatcggtctggctgtccagcaccttctgcacatcggtggtcacctcgtaggagccgcccagatacagcacacaggcgcggtattcgtcctcccctgccagaaggcgcatataggtcacgttctccggctcggtgtactcctgtttggcggagggcgatgcggtcatgttgtctccgtccagcattttttcgggcttggagctggacgcgctgctgcccttggacgacccgccgcagcctgcaaggccgatggtcagcgccagcagggctgccagaagtttcaggtttttcataggttctcctttctcatgccctgccggggcgcacctcagggggcagcgccggtcagcgggtagttggaaaaatcatacacgccatccaccggcacagggcggccggtctcggcggaaagctgcgggttccagtccagcgggcgtccggtgctgcaatagaccgttaccatggtgttggtgtcctccctgctgccgttgcacagcagcagaatgggctggccaccctgcctgccgtaaagctccttgcccgtctcgttcgggtactgaggatcctgcttttcatagacaaaaagcgtatcctccttacgcacggcaaagatgcagtacagctcccgcccgccgcccggcgctgtgacccagcggtctgccgggatgtccgcaacgaactgccacggctgttccggtaagctgtccagcacggcatgcacatcggtggtgcgctccgggacgctgcccagatagagcaccccggcaagctctccgctgtccccggccagctgccgcagcgcggcaagctgctccggctcagcagaatcggcaccggaagccgctgtgctgctgccctgcccggcgctgccgggggcggggcggacggggtcgccgtccaccgcaccgcaccctgccagactgaaagccagtgcaagcagtgctgcaaaagttttcatggctttcatgtcagcccctttgttttatgcccacgggtcggcagacgccgggatgcggataccggtcatcaggtactgatcccacaagaaccactgcccgtcgcccttgcggcgcagcttgatggggcgggggctgtcggcgccgccgcaggggatgaacagcttgcagtaaccttcctccacgttggaggtgtggttgctgcccaccagcagggtgaagggctggcggggggtatagccgttttccggcgacgcacccacaaagtaggagaacgggatatagctcttgccgtcccggaagcggtcgttcaggaaggaaatctcctgcccgttcatggggcggggaccccgcagccagttgagcatctccagcccgatggatttgtcggcaccgtaggcgcacagcgcgcagacggtgagggctgcggtcttgaagggggtgtccagactggcctccggcagtgcctgcatctgggcaaggctttccggcagagcctgaaaggtaaaggtgacggtctggttgccggaaacatttgcggcggcctgcttcatcttatcaaaaagtcccatgaaaatactcctttctgtttcagctgtgagggttcagctccggttcgggtcatggcggggcacggtccgcctgcggacgatcttctggttcagatccagactgaggtttacaaaataaccgttttcaaaataccatgcaaggtcctttgtgtccatgccaacgctgttgcacagccaccgcaggggcacctccggcccggagtagctctccaccctgcgggcgatggttcttgcatggtagcggcgtttttcgttgcgtgcgaacagaacaaggggcactgcgcccaccacgatccagaacacatacccgacaacgtgggaggtgtccttggcctgcaggtccagacagagggtatacaacccgccaaaagagcagaacacgcagaaggcaagccccgcgttccgcagccatttgaggacacgggggatctcaccccgggctttttccgagagataagggttcataaacatgctcctttcagaacgagccgcctccaccgccgtgggtggtgccgctggaagaggtgtgggtggagctgccgccggaatcgctggagcgggactccttcgg

SEQ ID NO: 13904 - DNA, 2693 bp, Unknown
  gut microbiota DNA sequence
gcacatagctggcggcattctcctggaacgccacgctgcgcagctggcttttcatcacatggacgacgacccatgccagcacaaggccgatgcccagcgcaaggaacaggtacatgagagacagcggctcccggggcaggttattcacgtcataggggtggcccgcccgggcagcgtcaatgtaggtatccgaccattggacaaaggtgcggaaggcaccggcgtagtctccatcggccatgaagggggtcatctgctcgccaaggtactggatgccggcatccgtaaaggcggtgatgccgtagccgcaggtggagatatgccatttgcggtcgcccacgctcaccagcagcagcacgccgtccatatcggggccgtagccgtactggcagtagtcatacaggtcgtcggcataggcctccatgctgtcgtagtccacgctttccagcgactcgatggtggcaatgaccacatcaaagctctggcggacgctcagctcctccagcgaagcctccagttcattatcctcgtcctcggtcagaacttctgcgctgtcgttcatgcggtagtacaggtcggcaaagccgccctccaccgcaaaggccggaacagccagcgccgccgcaagaatcagtgctgccagcgccgcaaagagggagtgcagtcggttggaagtctttttcatcgttcgtccctcctttacaggattcgtgccagccacagcagccacatcacgccgtaggacgcggcggaaagggcagccgtaaggcccagcatccacttgcgggcagcgcccttgtccacgggcaggtcacccacgaatttgccggtctgaccgttcatggcaaacagatagttttcaccccgccagctggtgctcagcagccagaccgggaacagcgcgtactttgccttgccgccgtgcagctggatgctgctgttatccaccttgaccgaatcgtagccggtaacggtctgctggaacgtctcctcagtggagcggcggatgcgcttgttggcccgctcgatgctgtcctcggcgctcacatcgtatttgtccgccacatagcccgccagataggcggtctggaacgggatggcgtcctgcatggcaaagggctcgatggattccatcaggtcgtcctcgatcttggaggagccgtccaccggcaccgcgtcaaagcccaaagtgccgtcccgccggacggagtagtagttggtctcggtatagtcgtatttgctgtccgaccagcagcgggtccgggtggcggtaaagcgcagctgggcgtcggcgtcgctgtcaaagagccagaagggcacatacacgcccttgatctcatcgatgtggttctggctgcggaacacccggggcagcagggtcttgcccttgagatgctcctgcaatttggccttggcggcctttttgtccagcttgaaggggatgatgaggtcgggccgcagggccccggcaaactgtccggtgaggacgatgggattgccgcagaaggggcaggccgaggcggccatggtgtcgtcgcccacgatctcgccgccgcagctcttgcagctgtaagtatgcagaccggcggtctccccttctgcccagctgccgccgggggtggcccagttcatctcgctgggcttttcgtccttcagctcctcgtcatagcccttgagggtatccacgtcgaactcggtgtcacagtaagggcatttcatcttctgggtggcgctgtcaaattggatggcgccatcgcagcaggggcacttgtattccagcattcctgccatagcgtttcctcctgttgttccaaagggggccgagggcttttccccggccccgctgtttttgcgtcagtcttcccgccaaagcggtcggctcagaagtccgtagtgatgcggaacaccaccggctcgtccggctcggtggctttgccgtggtggcccactgcaaggaaagcgttttcttccagcggcaggaagacatcaaaggtgcagaactctccgcacagctggcatagggtctcgcgctcacccacgggaagggacttttccaaaaaagtgccgtccggcgcgtacagctcccacatatagcccgtgtccagcagatagccgttggggcgcttcatcatcacggcgtcaaagctgcccaccggctgcgagctgcgggccacctcattgccgtccagatcaaaggcggcaaagtagtagtctccgctggagtccggctcacccaccgtcagcagctcgtctccgctgaggttcagggagggcatgctgcagaaggggccgatctcgttgtcgccctccagcgtcagctcagtgtactcgccgtcctgcaccagcaccggtgcggagtcggtccagtagatcacggtcagatcccgatccttggaggaatagcagctgcccatgtagtccagtgcgtcgccgggctcttccgggtcgctgctgttcagatcgtagcagtagacatcaaagttgtccatggcgtacaggatgccattgcggtcgatgctgagggcgttgcttccgtcaatgttgtactctgccaccggggtcatccggtcgtcctggatggcatactcgaagattttagcagactgctcttcatcgtcctcgttgtagaagctgaagaagtaattgccccggtagctgtccgcatggatgcagtgatgcgctccgtccagttc

SEQ ID NO: 13905 - DNA, 283 bp, Unknown
  gut microbiota DNA sequence
accttggtgtccagtcctttgcccttccagccggacacatacggcacgaaatcgatgtgcagatggggcgtggcttcgtccatgtggaggaacgctccgaacacccgcagtgtcgggttccgctcttggaagccctgcatatactcgtccagcagttcctttgccagtgcgccattctcggtcagaacacccatatcatctttgttgccgatctggacgatcagctcatggaagagtttttcctgcttgcctgtccgcaggtgctcatagtagtcggtgatac

SEQ ID NO: 13906 - DNA, 942 bp, Unknown
  gut microbiota DNA sequence
acaggcaaagcagcgtgcgaagtgctccttggacgctttcacggaacgaagaaacggggtaagctgcatctgtctgtcggttctgttcgtgatccttggggtagctatcaacctatgacggtgcatttctcccatccccatttgcttcttccaaagcctgtctgatgggattgctgctaaaccctcacagcgatagcccatcggtggttttgaaagatcaatattccttcatcttgtcactgcatcacagcagcaataagagcggaaccttgcaaaaggctccgctcttattgtttaagaaagtattgcatttcgagacggaaagaatatacttatattagctaaattccaatactagatggagggacaactatgcctagacaaaaaggaagcaagaatgcagtgcgtaccaagaaagcaaagattgactatgcagctattattgctgaaaagaccgctgccaaggagcaaattgaaaccgagattgttgcactgtctgataacatcagcgcactgaaagaccagctgaaaagtaaaaaatctgcgttgaaggttgcaacaaaggatctttctaaagcagaggcaaaaaaggttgcagccgaaaaaaaggccgctgaagaatctaagaaagctgaagcagaatctgtattgaaaaagctgcttgccagcggtatgtctgccgatgaaattatcgccaagctccagtaaactattatgggaaccagtaaacgaatttgtccgaactgcggacgtaaaatgaagtagcagttcattgggctgttccactgcaaatgcggcataagctggcggcgtgatataggatttttttaacgcactccagacatggtgttctcactggaacgcaaaaaaatcggaaataaagtaaaacagctaccgacgatacatcataagtaagcaagaccaccaaccggaaaacggctg

SEQ ID NO: 13907 - DNA, 301 bp, Unknown
  gut microbiota DNA sequence
aagcacgacacgccgttgctgttcgcaccgtcaggtgcgaaccatgagcagggtttggggcaggcacgccccaacaagatcacttcggaaatgcggacgcattgaagaagtgaagtcccggatggacaggaaattttcaagaattgaaaatttgtggccacgggacggttcttgccctctaccgctacgctcaaaacgtatagaccgcgtttgcgaagcgcagcgcagcaatgaaagccccagtggggcttttaagcggcagaacggtctgcgatagcagatggaggggcctcgccccgac

SEQ ID NO: 13908 - DNA, 1968 bp, Unknown
  gut microbiota DNA sequence
aaaaaattagtgagggagaacagaactatgaaaaattataaaatcgctgtggctggcacgggatatgtaggtctttcgttgggagtgctgttcgcgcagcaccatcaggtggttgcagtcgatattgtgcaggctaaggtcgatatgattaacaataagaaatccccgattcaggatgactatatcgaaaaatacttggcagaaaaagacttgaatttgaccgcaacgctggatgcaaaggcagcatatagcgatgcggattctgttgtgattgcggctcctaccaactatgatagcaagacccagcactttgatacttctgcggttgaggctgtgattaagctggttatggaatataatccgaatgccattatggtcatcaaatctactatccctgttggatataccgcttctgtgcgtaagaagttcaataccaagaatattatcttcagtccggaattcctgcgtgaatctaaggctctttacgataacctgtatccttcccgcattatcatcggaactgacctgaacgatgagcgtctggtagaagctgctcatgagtttgccggtctgttgcaggaaggtgcaatcaaagagaacattgacacgctgttcatgggcttcactgaggccgaggcggtcaagctgttcgctaacacctatttggctctgcgcgtggcttacttcaatgagctggatacctacgcagaaagcaaggggctgaacacccagcagatcattgatggtgtctgccttgatccgcgtatcggtagccattacaacaatccgtccttcggctacggcggatattgcctgccgaaagacaccaagcagcttttggctaactatgccgatgtgccggaaaacctgattgaagcaatcgtggaatctaaccgtactcgtaaagatttcattgctgaccgtgttctgaagctggctggctattacggctatgacgaggataacgagtatagcaaggatcaggaaaaatctgtaactatcggtgtttatcgtctgacgatgaagtctaattctgataacttccgccagagttctattcagggcgttatgaagcgcatcaaggcgaagggcgcaacggtcattatttatgagccgaccttgaaggacggagagactttctttggctctgtggtggtcaacgatctggcgaagttcaaggaaatgagccacgccatcatcgcaaaccgttacgacaagtgtctggatgatgttaaagagaaagtttatacgagagatattttccagagagattaagtaaaagaaaagaggataaaaatgggtaaatactttggaaccgacggtttccgtggtgaagccggaattactttaaccgccgaccacgcctacaaggtagggcactttcttggctggtattacaatgcactccgtgaacgcaacaatgaccatgagcctgcccgcatcgttatcggtaaagatacgcgtcgtagctcctatatgtttgaatacagtctggtggctggtctgacggcttccggtgcagatgcttacctgctccatgtcaccaccactccgtctgtggcctacatcgcccgtgtggatgacttcgattgcggcattatgatttctgccagccataacccgtactacgataatggcatcaagttaatcgactgctacggcgagaagatgccggaagagactctgctgctggtagaggactacattgatggcaagctccatgtgtttgaccaggactggccggaactgccttttgcgcatcgggagcatatcggctgcactgtggactatgtggcaggtcgcaaccgctatatgggctacctgatctctctgggcatctactccttcaagggcgtcaaagttggtttggattgtgctaacggtagttcttggaacattgcaaagtccgtctttgacgcactcggcgcagacacctatcgccaacgaaagaatacttgattgagtatt

SEQ ID NO: 13909 - DNA, 51483 bp, Unknown
  gut microbiota DNA sequence
ggcgggtcatccagcccttcaaacatcaccatgcccagaccgacaaaaccggcgcccagcgcaaaaccgactgtccccatcgacacgctgaacaaaacgcccatggcaacgccgaacaggatgcctgcgatttgacttttcttcattttactgctctgcctttccgtaccatgcaacggacagccgccatgagagagcatacagcgccagcgccgccgccagcactacgaccagcaccagcagcgagccctgcgcaggcaggaggctgtttaaagcattgtcccccgaagaaacgaaatatcccataaagcttgcaagcagaccgatgcacaggtagtacgcataccgggctttctggtagcccaagcggtaggccagcggcagcaaaataatgttgcccagcagggtcagcatagccacctgaagcagggtcgccacggtgagctgaaccgtcaccgtgccccagagcagctgtgctgccgccagcgctgtcatgctcagcagttccgccagcaccataccacacagtccgatgaggtatttgccgcccacgatctgtccttttgtcaccggcagggcggcgctgtaagcgctgaaccggccgttctggtcgtaagccagcaaggtcatgggcaggatgcccagcaaaagcccgccgtacagcataaagaaattagacccttccttcatgaaaaacgttcccatcagcatcatagccaccgacatcagaatgatccatctggtgtagctccacatctggtaggcatcctttaatagcagacctttcattgcacgttctcccctttcaccatcagtacaaacaattcctcaatgcttaccggggcaagctctgctccggcgggcattgcatcccggcgcacaagcgcctcggctccgtagggggtgacccgcttgccgtacaccggcgtatccagtgccgccagctgcgccgccgtgccgtgccacagggcgtattcctcccgcagggcgtccttttcctcacagagcagcagcctgcccttgtgcagaaaggcgatggtatcgcacagcttttccaagtcgctgacgatgtgggaggagatgaggatggagtggttttcgtcccgagcaaagtccagcagcaggtcggtcacctcgtcccgcaccaccgggtccagcccgttggtggcttcgtccaacagcagcagcttcgggtggtgcgccagtgccacggcgatacacagcttcatcttcatgccggtggagtagtccttgtactgctttttgtccggcagaccgaacttttggcacagttccgcataagcggcagcgtcccagttgcggtagatgcctgccatcaccttgcccgcctgcaccgcgttcaggcacagggggatgccctcgctgcccagcaccacgccgatttcctccttggcacggacagaagcggtgcggctgtccctgccaaggatggtcacggtgccgccgtcccgctgcaccatgtctaagatcagccggatggtggtgcttttgcccgccccgttttcaccgatcaggccgcagatggtgccgccgggcagggtcaggtccagcggcccaagggtaaagtccttatagtgttttgtaagtccctgcagttccagtgcgttcatattcagccctcccacagcagttccagcatctcccgcagctcttccctgctcagcccgcaggatacggacaggcggacggcttcggtaaggtgcgcttcaatttttttcaggttttcttccctcagcaactcggtgtttttaggggctacaaaaaagccctttgccggtactgcgtaaaggaagccctctttttccagttcatcgtaggcgcgcttggtggtaatgacgctgatgcgcagatcccgtgccagcccccggatggagggcatggcctcgtccggctgcaaagccccgctgatgatctgctgcttgatctggttgtagatctggtcatagatgggcgcgccgcttttgttgttgataaacagttccatcggctgctcctttaacgattgcgttttgtctgtatatgcacagtatatacagtagatacaggtttgtcaagagggtgcacaaaaaaatacacccgccgcccaaaacggacagcgggtgcaatttttatgggttttacagtgccttgatagcggtcttgatgcgctcggcggcaagcttggtcttttctgcatcgccgaaggcggtcagacggaagtagccttcgccgcactcgccgaagcccacgccgggggtgcccaccacgccgcagttttccagcagccagtcgaagaactgccagctcttcatgttgccggggcagcgcagccagatgtaggggctgttcttgccgccgcagtaccacacgccgcactcgtccagtgcatcggcgatcacctttgcgttgcggcggtagtaatccagattagactggatctcggccatgccgctctcggtgaacactgcggcagcggcgcgctgcaccacataaggcacaccgttgaacttggtggtctggcggcgcagccagagcttgttgatgctcatgccctcgcgctccagctccttgggcacgacggtgtagccgcagcgggtgccggtaaagcctgcgatcttggagaaggagcagatctccacagcacactcgcgtgccccctcgatctcgaagatgctgcgggcaagctcgccctccgagatgaagcactcgtaggcggcatcgtacaggatgatggcatcattcttgcgggcgtagtccacccatgccttcagctgtgcgcgggtgtaggcagcgccggtggggttgttggggctgcagatatagatgatatctgccttcacgctctcgtccggcatgccgaggaagccattttcctgcccggtgcggctgtaaatgatcttgcggccatcggtgacgttatcgtctacataggtagggtacacggggtccggtaccagcacggtgttgtccacatcgaacagacccagcaggtttgcaaggtcgctctttgcgccgtccgagataaagatttcgtcctcggcgatctgggtgccgcggccggcgtagtagccctgaatggcctgcttgaggaaggggtagccctgctccgggccgtagccgtggaagccctctttggtacccatctccgcagcggcgtcgcgcatggcctgcaccacgcactttgccagcggctgggtcacatcgccgatgcccagacggatgatctccttttccgggtgtgcctcctgatacgcagccaccttgtgggcaatgtccacgaacaggtagctggccttcagctcgttgtaatgcttgttcatcttcatgatactttccctcgcttcttttattggtgcaaccctctcagtcatctcgcattcgctcgatgccagctcccccgaagggagagctggcgccgtcaggcgactgagagggttcttatttacacttcggtcgtgccctcgcacacggtctcggcagcgccggtcatcagcagctgcttgccgggcagcacccggatggtcagctcgccgccgcgcagctgcacatggacatcctccccggcggggcagatgcccagctcggtcagggctgccacggtggcacaggtgccggtaccgcaggcccatgtctcgccgctgccacgctcccacacgcgcatcttcaggtgggtggcatccaccacctgcacaaactcggtgttgatgcgctccgggaagttttcgtggtgctcaaagcccgggccaatctgctccagcttcaggctgtccacctccggcacaatggtcacgcagtgggggttgcccacgctgatgcaggtcacccgccacaggttctcttccacctgaaggggcagatctaccagcggcccttcgcccatgttcacggcgggcagcgccgccgccatggcggtgtaggtgcccatctctacctgccacagcccctcgcccatgcgggcaacggtctttaagccgctgagggtgtcgatggcaagcttcggctttgcaacgccgtgggtgtacagccactcggccacgcagcggatgccgttgccgcacatcttgccctcgctgccgtccgcattgaagatgcgcatcatggcgtctgccccggctgtgaccggtgcgcagatgcagataataccgtccgcgccgatggaaaagtgccgccgggacaagcgctctgaaagcgcagcgatctcctccggcacaccggaggtgcggcagtccagatagatgtaatcgttggcgcagccctgcattttggtgaatgaaagcttcatgcttatcgctccttataaaagggactggtcagtccctgtaaactcattactttataatgataaaaaaaacggcacgagatgtcaagggaaaaagcagctttcagacaattttcttcagttgctgcaaaacagggcttgacaatacgcactgcatgggatataaaaaaagagagcgctttgtacagcaggcaaggctgtgccggataccggaggctttttccggggcacggcgggctgtacgcgtatgcaatacaactgcaaaaaggagaccacaggaatggatacttttgaaaaaatccgtgcattgctggctgagcagctggacgttgacccggcaaagatcacgctggaaagcgatatcatgagcgattttgaggctgacagtctggatatcgtagacatggtgatgacgctggaggacgagtttggcatcgaggtgccggacgacgccatcgagtccctgcgcaccgtaggcgatgtggtaaactttgtggacagccacgcgcagaactgattcttttaggcaaaagccccgcctttgcagtgcggcacacggccgtgcaggcagacggggctttattatggttcgtgcggaacgtaaagcgtttggcgcacggccttgggaggatataacaaaatggcaaaagacaacaagaagctcgtgcaggcgatcaccagtcaggaagaaaactttgcacagtggtacaccgacatctgcgtaaaagcagagctggtggagtattccagtgtgaagggctttatcatcctgcgcccctatggtcaggccatctgggagctgatccagaaggatctggacgcccggttcaaggctaccggccatgagaatgtggctatgccggtgctgattccggagagcctgctgcagaaggaaggcgagctcgtcaatggcttcgcgccggaggtggcgtgggtcacgatgggcggctccgacaagctggaggagcgtctggcagtacgtcccaccagcgagaccatgttctgcgaccactggtcccgcgtgctgcacagctaccgcgagcttcccatgaagtacaaccagtggtgcagcgtggtgcgctgggaaaagaccacccgtcccttcctgcgcagccgcgagttctggtggcaggagggtcacaccatccacgagaccgctgccgaggccgaggctgagacccagcagcagctgaactgctacgcagatacctgcgagcaggatctggcgatccctgtggtaaagggccgcaagaccgacaaggaaaagtttgccggtgccgaggccacctacaccatcgaagccatgatgaaggacggcaaggctttgcagagcggcaccagccactactttggcgacaagttcagcaaggcttacgatgtcacctttaccggccgcgacaaccagctgcatcatccgttccagaccagctggggcgtttccacccgtctggtgggtgctatcatcatgacccacggcgatgacgacggcctgatcctgcccccggccattgcccccattcaggtggtggtggtgcccattgctgcccacaagcccggcgtttccgaaaaggctgccgagctggccgagaagatcagcaagtacgcccgcgtgaagctggacgacagcgacaacgcccccggctggaagtttgcccagtgggagatgaagggcgtgcccctgcgccttgagatcggccccaaggatctggaaaagaaccagtgcgttctggtgcgccgcgacacccgcgagaaggtctttgtaagcttggacgagctggagactgccatccccgcccagctggaagctctgcgcaaggatctgtaccagcgtgcgctggaaaaccgcgaaaagcgcacctgggctgccaccaccatggacgaggtgaaggagctggccaaggccaacaccggctacatcaagaccatgtggtgcggcgatctggcctgtgagatgaagatgaaggaagaggccggactttccagccgctgcatgccctttgagcaggagcagctcagcgatgtgtgcccctgctgcggcaagcccgccaaggccatggtctactggggcgttgcttactaagcagctgcttttctgagcctctgcgcgggacgatctgaaatggccgccgcgtgcgctttggccatcttcagtggaaagaatattttatagttcggaacagcggaacgcctgcgggcgttccgctgttccctttttacaggaggggtcacagagggaaacagctgtcctattgctgacaacctgcacattctctgctgtggcactctcagcaaaaaagaaccgtcaccctggccggtgacggttcttagtctttaagaacttacatcaaaagggctgaccgcttgtcgcagtgccttttctatttacagtatacccacttttgaggtttctgtcaagagcacgcagcttcgtttctgcgtgcttttttcttaccggtcaaaggtggtgctgagggtggtctgccagctttcgccgggggcaaggcaggcggctgcggcgcgctgctcccagtcctgcgggtcggtaacggctgcgggcaggctgtgccacggctcaatgcacacaaagcgcaccggctttgcaggagccgaccagatgagcgaataggggtagccctccacccggcaggtgatattgcggccggtgtccttttcgcagatgccaatggtgccagtgcgcaggcctgccatgcagaagctgtcgttggcaaacaggtcatcggtcagctggatcgtctgctggttcttccactggtaatagctcttgccactcagcaagccgttggggctggcatcgaggatgaccgggctttccggccggtcaaaacggaactcgtagtcggtggtggtgtgcttggcgtcgaacggcacattgaacgccgggtggaagccgatgccgaagcgtagctcctcagtgccggggtttgtcacctgcagggtatggtgcacggtcttgccctccagacggaaggtgctggtaagcacaaaatcatagggaaaacgctctgctttgatggcatcgtccgcccgcagttccagctggatggtatccccttctgcccgcagcagagtgtgctccagatcccgggcaaagccgtgctgaccgcccttccatgttttgcccttggcggtaaagctgccgtccaccagcttgcccgtccacgggaacaggatgggggcgtggcgcttccagatggcggggtcggcctgccagagcagttcttcgcctgcggcattcttcaggctgacggcctctgcaccgtgggtgtccacggtcagggtcaggaattcgttgtgaatggttgcctgcattttcagtatctcctttgtccttcttattttccggggtctgctgtttccagtatactcccccgtgtgccaaaaataaagccccttcccatgcttgcacaaatcgtcactgggcaaaaggcttcccccgaccgggggaagcctttattcggaagcacgatttccatgctctgcttgcttcagcagggctgtaccagcggcagggtgacggcaaaggtggtgccgttttcgctgctgctctccacggtcacgccgccgccgtgcagtacggcgatctcccgcacaagggcaagcccaagccccacgccgcccatctcccggctgcgggacttatccacccggaaaaagggctggaaaatgctgtcccggcagtctgcggggatgcccgggccggtatctgcaacgcgcagcacagcggcctgcttttcctgccgcagggtgacgcgcaccgcaccgccggggcggttatacttgatgccgttttccaccagattgaacaccagccggtagatcagcgcatcactgcccaccatgcccagctccgcgcagtcctgctgcaaggagatgttgtttttctgggcaagggaggtcaggtcggtcaagatctcctccaccagcggtgcaagggcaatctggtcggtgcgggagaccgattgcagattgctcatttccagcaaagtgcgcacaagggcggtcaggcggtccagctgctcccgcagggagctgaccagcccggcggtctcggcgtccatggccgggtgctcctctgtaaacagctccagctttgtctgcaaaatagccagcggagtgcgcagctcgtgggcggcgttgcccgcaaactgccgttgcaattcaaaagactgtgccagaccatccagcatccggttcaccgaccggctcagctgcccgaattcctgcacggtatcttcgtccagacggacggtggcgatgctgtcctgatcgaccctctgcgcctgctgcgcaagctgctgcaaaggtttcagcgctctgccgctgacaaaataagcgatggctgcgctgaggatggtgaccacagcggtgatgcaccagcccttgcggccaaaaaccacctttgcatcgtagacttcctgtgaaaaatgcgccagcaggctggacatttcctcctgcgggatctcgatggtcaacgaatccgcactgccgggctggtactgcatcataaagccgttgagggcatccatgccggtaacgccggtgcggtataaaagcaggttcatgcacacgcaggcgcaggcgatgagcagcgctgtcagcagggtgatgcgccattgcagggataaatgcttcattgcgcctcgcctccgatctcgtagccttccccgatgcggttgcggatggggtcgtagcccagcgccgcccgcagctttttgcgcagggcagagatatgtacccggatggagttgctgaagctgtccacgctgccgtcccagacgtgctcaatcagctcttcctgactgaccgggcgtccctgatgcagcagcaaatattccagtacgccgctctccttccgcgtcagcgcaagggtctgaccgtccaccgtggcaacgcggctgcgggtgttgaagctgagccgcccgcagcacaggcagacatcctgctggatgaacttgcgccgggtcaggctgcgcacccgggcctccagctctgcaaggtggaagggcttggaaagataatcgtttgccccggcatccagcccctccaccttatccgcgatctcgctgcgcgccgataagatcagcacacaggtctcaaggtcgtgctgccgtaagttgcgcagtacctgcatcccgtccaccttgggcaggttgaggtccagcagcacaaggtcgtaccgctctgccgccagtgcttccagcgcggcttcgccatctgcacaagcgtccacctcgtacccggacagacgcagcttccgggcaatgtcctcccgcagggagtgctcgtcctctaccaccaaaagacgcatcttgtgttccacccttcccgtattattgcgttttttcttcattataacagattatagcagacggtgttaagattcgtgttaagattttcttagcagaaattttatctcccatggtgtatactggtgccatcaaacaacaggaggctatgatgttcatgacaaaaaaacaggcgcagctgcttttgcttgccgccggggtgctgatgctgctgttcggcgtatggcggggcgaggcagacaccgtattttcaaaagccatccggctgtgtatggagtgtgtaggcattggataagaaaaaactaaatccccttgcccggttccggggctttatacaggccggggcgacccttttgaccaacattcatctgcccaactttgccaaaggaacgctgtatcagggcagcggaaaatacgtctgcgtgccggggctgaactgctattcctgcccgggcgctgccggtgcctgcccggtgggagcatttcaggcggtgataggctcttccaaattccgcttttcctactacatcaccggcatcctgatccttttcggggtgctgccggggcggttcatctgcggttttctctgcccgttcgggtggtttcaagagcttttgcacaagattccctcccccaagctttccaccaaaaagttaaagccgctgcgctatttaaagtatgcggtgctgctggtcatggtggtgctactgccattgctggcggtcaacgagctgggcatgggcgacccgttcttctgcaaatatctctgcccgcagggcgtgctggaaggcgccattcccctctccctgaccaatgcgggcatccgcgccgcgctgggcaagctgttcacatggaaagcctgcattctgctggcagtcattgtgggcagcgtggtgttctaccgccccttctgcaagtggctgtgcccgctgggcgcgttctatgcgctgctgaataaggtctcgctgttccagatgcgcgtagacacccacaaatgcgtctcctgcggcgcctgtgcaaaggcttgcaagatggacgtagacattaccaaagcccccaaccacgccgaatgtatccgctgcgggatgtgcatgaaagcctgccccacagatgccatccagtacaaattcgggctgggagacaaatcaaacactgaaacgacaaaggagtaaaaccatgaagcttaaccgtgtaaccgcacttttgctcagccttgtgctggccttcagccttgccgcctgcgggcagggcgcgtcctctgactctactgcatcttcttccgcttcctctgcggcagcagaaggcaagaccgaggagcagctgctggccgaggaaaacgagatcctttccgcaaacgatgccctgtgggagaaggtgttctcctccatggacaaaaacgtgactgagaccaccctcagtacgaactacggcgattttctgctgagtgccgtggaaaagacaaaggaccaattctcggacgaggagtacaagaccctgaccgccgatgcggaaaagatccgtgccattgaggaacaaattgctgctcttgcccctgcggacgcggccgcttccggtgctgccgcacagggcaccgccttcccccagtttgagggcaacgatttagagggcaacccggtggacaacagcctgtttgcgggcaacgcctttacggtggtgaacttctggttcaacggctgcaagccctgcgtggaggaactggacgacctgaacgccctgaacgagaaggtcaaggcacagggcggcgaggtgattggcatcaacaccgagacgctggacggcaaccagcagggcattgatgccgccaaaaagctgctggctacaaagggcgcaagctaccgcaacatctactttgcctccggcagtgaggccggtaagtttgcgctgaacatcatggccttccccaccacctacgtttttgaccgggacggcaatgttgtaggccagcccctgctgggaggcattgacaaggaagaaaaccttgccgccctgcaaaaaaatattgacgccgcccttgccaaggacagcgccaaataagctattctcccctgccgccttcgggcggcttttttgtttgctgcgggcattgccatgcacgcccgggcaccggacggaatacgctgaggcagaagcatacttttaccagcaaaggagcgtatctccatgaaaaacaccggaattctccgcatccagacctttgcggcacgccagtctgcccccgtggagggggtgaccgttgcggtgcagggggacggctttaccctgcactgcatcactgatgccaccggcagcgccgccgatattcccgttgaagcccccgcctgcaccctctctctggacgaggacaacactactcgcccctacgccattgtcagcctgaccgccgcaaagcccggctaccgcaccgtgcgcattgagggcatccagatctttgccggacaggtaacgctggcacagccccagatgctgcccgacaccgaggaaggccgggacatcccgaacgcgcccatcatcatcccgccgcacgctttgttcgcgggcagcggcggcagcggcccgcagccgcgggaaaactgcacgcctagggtgctggaacaggtcatcatccccaaaaatatcacggtgcatctgggcaaaccggcagcttccgcccgcaacgtgaccgtctccttccgggattatatcgcaaatgttgcttccagcgaggtgtatcccacctggccggagcaggcactgcgggcgaacatccactgccagatctcgctggcgctgaaccgcatctataccgagtggtaccccagcaagggctacaccttcaacattaccaactccaccagctacgaccagtactacgtccacgggcgcacggtgtttgaggtaatggtgcgcatcacggacgatatctttaacacctatctgcgcaagcgtggcacggtgaacccctattattccgagtattgcgatggcaagtcggtcacctgcccggggctcaagcagtggggcacggttacgctggccaacaacggacgcagcgccttgcagatcttgcgctactactacggcagcagcatcgagatcgtgcgcaccaaaaatatccgctctatcccgcaaagctaccccggcacgccgctgcggcagggcagccgcggcgcggcggttttcaccctgcaaaggcagctgaaccgcatcaccaaggactatcccttccttggcaagctgacggtggacggcgtattcggcagccggatggccgccacagtgcgggcgttccagaagcagttcaacctgaccgccgacggcgtggtggggcggcagacatggtacaagatcagctacatctatgtatcggtaaaggacctcgccgagctgaccagcgagggcgagacttccaccggcaccctgtccaacggcacatggaacggcacggtgctgagcaccggtgcttccggcagcgcggtggagcaggtacagttctggctgaacacgctggcgcagtacgacagcgccattccatccgtaaaagtggacggcgtattcggcaccgccaccgccaatgcggtacgcgccttccaacgcaaatacggccttacggtggacggcatagtgggccagaccacttggaaagaactgtacgatgagtttttgagcatccagtccgacaacggcacacccaacgcctaccccggcacgccgctgcgggagggttcctccgggcagaatgtgcggctggtgcagttctggctgaagatcgcccgcaccgtgtacccaagccttgaaaatgtgaccgtggacggaaaattcggcgcaggcacgacggcggctgtgcgacggttccagcggtacttcggactgacggcagacggggtggtggggcgcaccacatggcaaaagctgtacgaggtgtacaacgatatcgccaaccggctgctctcctcttccctgcgccccggcgagtacccgggcgtactgcgcaccggctccaccggcacgccggtgcgggaacttcagttttacctctacctcatgagtgcctacgaaagcagtatcccgccggtaagcattgacggcaagttcggcgcagataccgagcgggcggtgcgggcgtaccagcggtttgcagggcttaccgtggacggcgtagtagggcgcaccacatggaactccctttatggccgcgccagccagctgcgctcttccggcccggtggtcaccttaaagcgtctgccctaccccggcaccccgctgacagtgggcagcagcggcgagaccgtgctgtactacaatctgcttttgcagcgcatcgcctattatttttccagcgtggaagctccgccccttgccgaccgctataccgaagaaactgccaccgccacccgcagcgcccagcagctgctggggctggagcagactggcattgcaaatgccgacacatggacggcggtggaggcgctgagtttgcagctggccgctcacgccccgaatcccgatggagacacccctcccggcaccgcttacccgggacgcgccatcgccgagggcagcgccgggcaggaggtgggacaggtggagcgctggctcaaccgccgggcacagctttcctgcggcgagggctatgtagccgacaacaaccgctttggcgcgtcagacgccgctgctgtgcgggctgtccagcagcaggcagggctgcagccggtaaacggcatcgtgtaccgcgaaacatggcacgccttgcaagcccagtgtaccgacccctgcggctgcgataaggaggaatgagggatggcacgccttttgatctatgacgcctacgaaaacaaggtgtacacctacgcaaacctgaacgagaacgaccccatgccttacagcaccctgaccaccctgcggctgcgggagttccggggcaaatcggccagccctaccctgtggaccaccattgccgccatggaagcgtggaacctgacccgccgcaaatacggcaggggcatcccggtggggtacgccttccgccgcatctgggagggcggccacggcacccgcagccagcactatgcaggggtagcgtttgacgtagggcaaagccttggccagcgccagcgcactgccatttacaacgctgcccgcgcttccggcgcatggggctatgtggagccgctgagccagacccccacatgggtgcactttgaccgtcgctacggcaccccggcctgcagcggcaccaccgccggttaccctaccctgcgccggggcagccggggctgctatgtcatggttttgcaggatgcactttccacccttggctaccagaccggtagccgcatcgacggcatctttggtgcccgcaccgagcaggctctgcgcggctaccagaagcgcaccagcctgcgggtggacggcgtgtgcggctgcgacagctggaaaaagatctccaccgccgtcattggcatcgggcgcaccaaaaccaccattgactagcgcttgtcctatacagcccatacagaaagagcgaccgcacaaaacaatgtgcggtcgctctttttcactcactttacggcctgcttcagctgttccagatctgcggcatccgggtgggagagcgccttatcgaagttttcgatcagggcatccagattggggatgtgcgcaggctgcgccttcatcgcctcgtaccgctgccggacggacatgggcattttgccctgacacataaagctgccgatgacggtgttgctcccgtccagcgccttccgggtggcggcaagaatcttttcaaagtaaggcgcactgccgccaaagcctgcggtgccgaacaggaatacccgcttgccgtgcagctgctgcaagaaatccagcgtgtcggcgtccgccttacccttgtccgtccagaaacccacatacagggtgtctgctgccagcgcggcagcatccggtgtgccaaaatagcagcagtctgcctgcggcagctgctcctgcagggtctgtgccagcagtgcggtgttgccggttttgctgctgaatacgatggcgtaactcatcacttttacctccctcagagcagcggcaaggctgccggatgctcttgtgcatacgttatttttacggcagttcctttgccgggagagcctgaaatcatggaacagtatagtacagtgccctgccaaaatcaagggttgacgatattttcgcctttcccggccagaaagctgcgcagattgccggtggtgatatccatcagccgctgcaatgcttccttggtggtccatgcaatgtgcggggtgagcaccgcgcccggcagactgcgcaaccggctttggggcggcagtggctcggtggcaaaggcatcggcgccgtaaaaggcaagcttgccactttccagcgcatcggctacggcttcctcgtccaccagtgcgccccgggcagtgttcagcaaaatagcgcctggcttcatttttgcaagggcttcccggctgaccaacccgcgggtttccggggtggccgggcagtgcaggctgagcacatcgctgcgggcaagcagggtgtcaaagtccacgaattccaccccatcggcggcgtactccgggcgcaccgtgcgggtgcacaccagcacctccatgccaaaggcctttgcaatgcgggcggtttggcggccgatgctgccgtagccgtagatgccaaaggtcttgcccagcaactccacctgcggcagcagaccgtactctgccgggatgcccagctgccagtatccggcctttactgcccggtcgtaccgctgggcgcactggcagatggccagcagcaagctgaaggtcatctgcgccacactgtaagtagaatagcccggcacgttggctactgccaccccatggcggcggcaggcttcaaggtcgatattatccgtaccggtggcgatgatgcccacccacttgaggttcgggcactgcgccagcactgcttcgtcaatgcggcacttgttgatgagcaccagttctgcatccccgatgcggggcgcgatgtcggcgtagtcggtgcgcacatagctggtggtgtccggcaccagtgcctttaccccggaccagtccaagtccccttcttccatcacatagctttccagaatcactgccttcataatttcccattccctctctggtttacgttattccgtttctttcagcggatagagcgccagtgcaagactgccgccgtaggggcggctgtccagtgcagcatagccctttgccagcagcagcgccagctgtaccctgtcctccagcggcacccacaccggtgcagtgcggacgggcgcgcagccggtgcacagcaaaaagcagggcgcaaggctttccagcgggcgcagcgcccgcagcccgaagccctgccgaaaatacagcggcaacagcgctgccgccgtttcggtgcactctaccaccgcccatgccgtgcccttgcggcgcagccggtctgcccgggctgcggcaatttccaccagccgggtgggcagctcctcgccggtatttaccggcggggtgagcaggcagccgccctccagctgccgacgtcccagccagttgcgcagtgccgctgcggcggcggtatcggcggtaaggggtagcaccagcagcgctgccccggctgtgccccacgcctcgcctgcggtcagcatccgcagcacctcggagcggggacggtaaaaccccgccccgccgcagcgcaccaatgtaaaaaattcctcggcggaaagccgccgtacctgcctctgacgcggtgggtcgcatacctgaatcatttgcagttcctccgttctgatgttctttccatcagcatacggaaaactgcgtgcaaatcggcgcgaaacagcgcgcctgaagcgcaaaaatcagtccagcgaaacgtcctcgctcagcacctgcccgattggctttgcaatgcacaggtcggcggatgcatcagccccggtgggctgcatattgatgaccaccaggttgtcgccccggaagtaccggatgagcccggcggcggggtacaccaccagactggtgccgccgatgataagggtatcggcatggcggatggcatccaccgcgccggacagcacctcctcgtccaagccctcttcgtaaagcaccacgtccggctttacgatgccgccgcactcggtgcagcggggcacaccggtgctgtttgcgatgaaatccacatcgtagaacctgccgcagcgggtgcagtagttgcgcagggtgctgccgtgcagctcgtacacggttttgctgcctgccgcctgatgcaggccgtcaatattctgggtgaccacagcccgcagcttgccctgctgctccagctttgccagccgcagatgggcggcgttgggctttgcaccctttacgatcagcttgtcgcggtaaaagcggtaaaactcctccgggttttcctcccagaaggtatggctgaggatggtttcgggcgggtagtcgtatttctggtggtacagcccgtccacgctgcggaaatccgggatgccgctttccgtagaaacgcccgcgccgccgaaaaagacgatgctgctgctttttgcaataatgtcttccagtgccttgaccatagttgaaacgcccctttcctcacggaaatttttgtgttaagataataccagtatagcacattcttacaggaaaggaagaggccgattttgaacgtctggtacatcaacagcatccttggtgccatctgcttagaggaggagaatgacgcgctgtgcggggtacatttttgcccggacggtgcgccggagctggaacctctgccacgcagggtggtggaaacgcccctgctgcaggaagccgaggagcagctgaatgaatattttgccggggtgcgccgggagttcgacctgccgctggcagcaaagggcacgccctttcagcaggcggtatgggcgcagctgcgcaagattccctacggggaggtgcgcacctacggacaactggcggcggcgctgggcaaacccaaggcaagccgcgccgtgggcagcgcctgtcaccgcaacccgctgtgcatcgtggtgccatgccaccgggtcatcggcgcagacggcagcctgaccggctacgccgagggactggagatcaaggaatatctgctggaactggaacaattttaagagaatgataaaggctgctgcgcatcgtttgcgcagcagcctttggcgttttatgcagttttaaaagcccgtaggcgggacgtaatagcttgggatagacccgcttttgggcgtagctgcggcctgctggcgcagcgccgagcgggtaacctctgcccaggaatactgggtcatatactcgccccggtaggagttgaaggccgagtggtctccccgcaggaagttataataatcgcagtccaccttgctggtatccagcgccaaggtgctgcggccgcgtaccagcagcccgttgacccctgcatcctccagcgtatggctgaggtcaaagatcaaattgcgcaggtggctgtgcagcgaggcggtgtcaggcttatcctcccacaggacagccagcatctcgccgttggtacaggtggcaccgttgcggtccacaaggtaggccagcagctccttgctcttactgcgcttgaaggagagcggacgtccgcccacaaagatctcgaagttgccgaagcactggatcttgatgcccacaggtgccgtttccggcgggtaacgcaggttttccagcacattgcgcacgtccgcctcgttggcgggcttgagcagaaaaccgctgacgaagatctgcaatgcttccaacgcatactccggatgctcggtgactacgatgatattgcagcggggctgcaatttctggatcatgcgggcaagggcaaggccattcatgcccggcatttccaagttcaaaaaggcagcatccattgggccctgccgcatccacgtcagggcatcgtcagttgtcatggcactgatatagtcacagtccggtgccacccggcacaggatgcggatcagcgaattgatcgcaagctgaccgtcatccacaaccagtattttcatagcttcaccccctatctgcttacgcaaaacaattccccgctgttagtttagcacgccgcaaacttttaggcaagtttttttccggaaaaagccaaaaaagaaacgttttcgcccagatatatgtccatcttctcctgtctcttcaagtcatttccgcagcttcggtcgcctttttcgacgaaataccggagcattgcgcgctcaattgatatatcaaatcagcgctcatttgtccccgcttcccgccggaaggcacggcttttccccgacaaacacaaggccgctgcaccggtcttgtgcagcggccttgtgaataatttgcgtttggcgtgctctgcggcgcgctccaaacgttttttcacgggttcttcaatggagatccagctccggcgggacatccagctggtcggagacatatttcccattctttttgcgctgacgcacacactcggtaagcagatattcgatctgcccgttcaccgagcggaagtcatcctctgcccaagcggcaagggcatcgtagagtttggcgttcaggcgcaggggcacctgttttttcggctcggccatcagtacaggctgccgctgttcacgatgggctgggcatcccggttgccgcacagcaccaccagcagattggacaccattgccgccttacgctcatcgtccagctccacgaccttgttctcgttcagacgatccagcgccatttccaccatgcccacagcgccgtccacgatcatcttgcgggcgtcaatgatggcactggcctgctggcgctgcagcatgaccgctgcaatttccggtgcataggccagataggtgatgcgggcctccaccacctcgatacctgcctcggccacgttcttctggatctcgtcccggatgcgggcagccaccacctcagaggagccgcgcagactgccctcgtcggccacgccgtcgccggtggtatccacgttgggagaaacatcataggggtacacccgcactacgttgcgcagggcgctgtcgcactgcagggagaggtattccttatagttatccacgttgaacacagccttggcggtatcggtcacgcgccagatgactgcaatgccgatctccaccggattgcccagacaatcgttgattttctggcgggagttgttcagggtcatcatcttgagcgagatctttttgctcatggactcgacgctcatctgagcattctggccgttattgccaaacagcgcagccacgctgttctccttgctgttcacatctccgctctggctcaggcgggtgccggcagcggggttgacggcggtacagaaggggttcacccagtaaaaaccctgtcccttcagggtgccgatgtaatcaccaaacagggtgagcaccagcgcctcctgcggctttaacaccttaagaccgcagaacaggaaaatgcctgcgatccaatacgcaatggacaagatcagcagcggaatgcccagaaacagccggtgcggccgatctgcattgagcagcgtgatgcagaaaatgaacagggcgatggccaccacatagcccagcaacgtgagcagcaacatagccatgccgtttttgcgggtgttcaaaattttttcttccataacaggtccctccttatcagggtcggaagcatttctttctgatatcaaaatcatatcactttgcagaagagctgtcaagtattttcaacaaaaaccccgcctgcccgggtaaagcgggcaaagcggggtcaagcattatgggtgccaggcagacagagtttcaggcgtctgcctgctcttctcccccgatcagcaccacggcaacatcattgacgttggtaccagtagcgcctgtgatgataagcccatccaccgcctgcaaggcgtggtaggcatcgttgttttgcagggtatcgaacacgttccggcccgctgctgccagtgctgcggcggtgtcgccgtccacatagccgccggcggcatcggtggggccgtcggtgccgtcactgcccacggagaacactgcggcgttctgtcccgccagcgccggggctgcggccagcgccagttcctgattgcgtccgcccagccctttgccggtcaggtgcaccacggtttccccgcccgcgataaaggccagctttttcccctgccccgcatgggtgcgggcgatggcactcagaaagctgcctgcctccttggcttcgcaacaaagccggtcggtgaggaggatgggctcatagcccagctcccggcaggctttagcggcagcggtgcacagctctcggacgctgccggtgatctgcgtggtcacgttgtcaagagctttcggcgtttcctgcgccagcagcgccttcgcctgttccgacaggttcaggtggtatttctccgcaatggcaagcgcttgtgcacaggtggaggaatccggcaccgccgggccgctggcgatcatatccagcggatcgcccagaatatcgctgagcacgatgctgaacacccttgcgggcgcgcagtgctgagcgaaccgcccgcccttgacagcggacaaccgcttgcggatggtgttcatctccacgatatcggctccgctggcaaggagctgattggtgatgtcctgcaattccccgccggggacaagcggcttttcaaacagggcgctgccgccgccggaaagcagaaacagcaccgtatcctctgcggtcagtccctgcaccagcgccaaagctttttcggtggctgcaaagccgttggcatccggcacgggatgacctgcctcataacaatttacaccgggaattctgccttttacatggccgtacttggtcaccaccacgccgccgtccacgcgccccagtgcctgcacggcggcgtgtgccatctgccatgcggccttgcctgccgccaccagcagcaccctgccgcccctaggctgaaagttttccagcgcgcggcacaccgctttatccggcagcaccgcctgaatgctggaacagatgatctcatccgcatcccgccgcaatgtggtattcataatacagtcctcctaacagagtttgcccatcctcgatccgaatgacctgctgcgcaatttagtgcagccctaaagttatgcttcaaacattttccagctgacacagccgtccagccagaattttccgtttccagaggtcatgcgcaccttattctgtgcatccagatcgttaaagtgccaccactccgaggccagcggtgtcatgcctgcattggtacagtacccctgcagccgccgcgcaccgtctgtcatggatgccgatgcagtggcccgcttccatgcggtggccgaattagaagttaccgggccggtaaagcaggccgctgcactgctcagctcgtgcatggcagagggcatggcgtattcctcaccggtcacctgtacaaagggacaccccgccatgctgtgctctgtctgctcagtgatgcgcagcagggtcgtgtccattgccacaccgcgctgatggttggaaagagacgttgcaataaaccagccgatattccacgcgcccttgttcagcgccgtcttcagttccttgtccgtccttgccttggcgtacaccgcatcctttaccagcatctgcacctcatagggtcggaatgtctctatgatcttcaggcaatcgcccgccttcaaagcatttttctgcgctgcaccaaccttttttgccatagcgtaattgataggcattagatactcatcccgcccaaggcgctggttgtagaacaggccgtcatacagtttctgtcccgtaatgccttcaatatcctttccgcaggttttaaagatcgatgccttggcattggggttttcgtatacgatggaaggcagaacatcgggcagattgatcatacacagttcattttccaaccagcccacggtgccgtccagcaggcagacctgccaatatgcgccagactcctgccggatataaaacatatctcccgctgcaagtctgcgcagtaccgtactggccccatccggtctctcgtacagcagcatcacagccgcccctgcaaagcctgttgaaccttccaacggcagttcgaagttctggggaacgcggataccatcccgcagaaccgcattgtcgtccagtgctgcattccacatcggtccggtttcagagaccggatcactgacttcctgctgctgccagctgacagcccgctcttccactgtggggttctggcagcccgtcagaagccatgcgcatgccatggccgaaaggcacagaaaatcacgtcttgttgttttcatgtattttccgtcccttcttcctgctgttcctgtgccggagtttccggcgctgtcggtgccttcaatgcggtctcctgctctgccgccgatccctccggcgactgcgtcggctgttgtgccgccggggcagtctgccccgcttccgttgtttcggtctgtgtcggctgcgcttccagcagttcttcctccggcggttcgccctctgcatcctttgcaagatcgtcctccggtgcctgatccccaaccggctgaacactgccgctgccgttcaggttgctgctaagtgcgccctccccgaatgtgcccgactgactgacgccgttgataaaatagtagcttttttcatgggaatgatcccatccctgcttcggttctccatttgtcccaaaagcatagggctggccatcgatcacacaccacccggtcatctgatttccgttgccgtccaaatagcgcgtgcccgcatccgtttcaacccagccggcctgactgacaccgtccacaaagaaataatcctttccatcgatctctgtccagccctgtgccggtgcgccgctgttgtcgtagtatttcaggacgccgtccgtttttttccaaccgttcagtcggtttttgacccgtccatcgctatccagttcccagacctttccgtcctcctgataagtaccggtgcgcggatgtccggtttcgtcaaagcagtactgcactccgtccagcatgatccagccggtgtacaactgtccggtctccggttggaaatagtagtattttccgtctatcttcgcttcgccctgggtgagctctccatctgcgttggcatagccgacatagccgttctcttcaatccagccgaccttcaaaaagttgttgctgccaaaatagtagagcttatagttgatctcatacagcccctgcgcacgggtgccggtagtcggcgagatatagtagcgatgcagtccttcgccgtgccaccccgtagtcttactctggatcacattgtaaactccaaaagcggcccctgtgagcagacacaggcacaccagtactacaccgacggctttcagcggcgttgccgcccttcttctgcgcgtattctgcgtcacgctaaaccgatatcgtttgatcttctggcgtttcattctcatcttcccatataaagattcagcccccggtggaatgccagaggccgaatttcatgtttaataggcgtcctgtaccgtctctttaccgttttcacggtaggtcgtcacagtaaagccgttgtaatacagcaggccatcctcgccatcaccgatgcagctggaagcatactccgaactgttcggcttgccaatagcggcatacagcttggaaacgtctttgcccacatacttcagggcagtttccaggctggcagtttctgccggagcagtctctgtaacgggcttgctttccacaggctccgtcttttcttctttggaggaagcagccgtctcctgctttgcaggcttagattttgccgcagtctcggccttggattcggccttggattcggccttcgactctgccttggattcggccggtttctccgatgccgcctcgcttaccgcagaagaagcttcagaaactgcctccgagaccgcctcgctttccggcacagcctccgacgaagcagcctccaatgccacaacggaaaccgattcggattccacagccgaggaagcggtcgtttctgcttttgccccgcatcccgatgccagaagcatcgcaccgcagagcactacacccatcatcttatagtttacattcattttgtttgttccttctttctattctttcagtcagtcggccaaggcgcagaagacccattcaccgtccgacagaaatgctgcttttagttgctgctcccgcacattctgcggaagatacgccgtaaacggctgtgttccctctccgcagggggaggcttcgtaggttccggtctctgccagaatgtagatcggagagtcgtcatccacacgctgcccgctcagatcgcctgtcaggcagaaagtttcctccattcggctgtccttccgttgtgccttcgcacttgtaccggtatctgctgccgggactgccgtgcgttccggagcaggcatttccggggcgcgttccagcagccagttcaggttgcgttccaccagttccaccagcagcacatcgggatgctcttctgtaacagccgtcaaaaggtagggcatattccgggagaaacaggcattgccgtagctctgtgccagaaaaggatgcagattgatgccaaaggaatcgcggtatacaaaaatgctttcgtctgccgccgaattttccgtgtggatcgtgatatcatctgccgagtggaatttttcgtcatactgataggtaaagtcgtatgccgtatcctgttccgtctcgtttccggcagggtacaccatctcatacagatcgccggtatgcggggatgtttttccattgatgcaggaatcaaactccgcttcagagcctttcagttctttcagcaaagtctgtgctgccagctgtgcgccccgcatattccagtggctgtcccgacggtaatacagctgctcttcgtggtcagacagtgttttgaacagatccacataccggacattctgctgttccatctgctgctgaagcagttgggcgttccgtacggaggctgccgtataccgtgtcggcatctgaccgccatacagggaatttttattgggtgcgatggtaaagcagaacccaatgccgttctcttcgcagtattcctgcatcagacccagtacatgagcggccgcataactctgccgggctgtaaagggttctgcgccggtatagtccgcaagggtgcttttatagaacagccaatcgtcttttcccaacagcacactgctgctgtccagcgttttgagcacggttccggtaagctgatcgttcaaggtgatcatctcatgacggagcccgaaatgatccgcaaaataatccgaaaactcattcaggataccggtattgaagctgccatcctctttccgtaattcaggaaaggatgcaagctgctcattgcccaccgctttttccgtctgccaaggcatcacagccacaggcaaaatgcaaattgtggcaatgacccccacaaacaggatatatcctaattttttcacttgcatttttccacctcagaactggaaatagataaaaggcacataggatgcagccgacagatgcaggatatccaccagcaaaagcgccagcgcccctgcataactcagtgcctgaaggcatgcatacacgcttccggtctgctgctctgctttacggcagaccagcggcaaaaccggcgtactgcccacaaggccaaccgccagtgcaaacagggtcagcggggtcagacactgcgccagcagcagccctgtctgcgcagaggcagagaccccggaaagcatggctcctatcattgagaaagcctgccccatgttgtctgcacggaagatcacaaagccaaccagcaccacaagcagggtgtacaaatgtttcagcaccgcacacgcagggttccgcccgcctttgccatgtttttccagcccaaacagctttttaacggcgtcctctgccacgataaagaagccatgccacaaaccccagacgataaaggtccagtttgcaccatgccacagccccgtgcagaaaaacacgatcagcttgttccagtaagtcttttccttgcccttccggttgccgcccaatgggatatacaggtattcccggaaccaggtggaaagggagatatgccatctgcgccagaattcctgaatactggccgagatgtacggataattgaagttttccttgaagtggaacccaaagcacaagcccaggccgatggccatatcgctgtatccgctgaagtcgaaatagatctgcatcagatagcacaccgcggccagccaagccgtccggctgtccagcacagagcggtcggcgttgtagatcagtgctacaacattgccgcagatatcggcgatcagcagcttcttgctcaggcccacaataaaccggcgcaggccttttgccagctgctccagcgtatttcggcggctatggatctcatctgccacgtcctcatagcggatgatcggtcctgccaccaactgtggaaacagagcaatgtacagcagtacatcccggaaatgggtgctcttcaggcgttcattccggtatacgtcgatcacataactcagcccttgaaaggtgaagaacgagatgcccaccggcagaacgatggaaggcaccgggatcgtcacgcccggcagccggtctaccgtctgtaccagaaaagtcagatacttgaaaatacccaagattcccagattaacggccacagcggcatagagcacgctctttcgcccggagacgaacagaccggccagataattgcagaacacagagaacaacagcagcagaacataccacagcccgctgaaggcatagaacagcagactggctgcgacgagccagagattttttgcttcccgcccgggcaaaagataatagcatcccagcacgatgggcaaaaacagaaacaagaaaattacggaactaaaaaccatttttcggctacctcagcaatcacggaaactggtagctgaacaccgttttattcagcggcattttatacatattatattctgcatggccgtatctgccggcacgatagccccactccagttccacatcatagatatagggaactccgttctcgcagatcatgacccatgcatggtccgagtccttgcggcccacaccgccagacactacataggcattgtagcccagccgccgggccatataaaggaactggcctgcaaagcagtagcagttgccctttttgtgttcaaacatgaacaaagcgctctcttctgcccaagccgttgtgcctcttgcctgatgcggacgggcaaggtatgcgccgtgatcccggacatacaaataggcggcgcgcagcttttgcgccttcgtcatgccagagtttgtgcacgcagccagtgcctgatccacatagctgtccagcgttgcattgccagaggtatagcggccattcgcatcaaaagtaaggtattctaccgcgctgttcgtcaggaacgagccatcctctttgacatagtacattcctccgtcgatctcgtgcaaacccttggcgtaccgatcgatggcatagccattcttcgaaacatgatacagcttgccgtcaatcgtcacaaagccacctgtgccggtgcgtctactgactgcaccgcgtatgcagtcggcaccagaagcatggccgacattgcaagaataacagccgttacactaagttttttcagcattttttcataccccttaatcgattgatttttattgatactcgttccagatctgttccttcagctttttttcctgctgcgcaggatccatgctgaaacgactgccgcaacagccgaaacgatcatgccaacgattccaaccacaaaaaagatctgtccggtagacgcaggtattccctccttatttgagccatccgctggtgcggagctggtcgatcagaagataggccatctgcatatcaaaacgataatccgatggatactgctcctgcagatctttcaaaaccttttcagcttcactgtactgatccaatgcctgcagtacagttgccagattcaaccgggtggcaatagtatcgtagccgctgtccaccagttcctccagcagttgctgcgcttcagcatagtattcttctgcattttctttgtcagatgctgcctgctgcatcataagatccgcaagcatctccttttgaagcacagcctgaccttccggaaggttctggcatccctgtttcagaatgcgcacagccttttccatatcgtcctgattcagcgctgcatttgcggctgacaggtaagcatggctcaggagctgcgggtcctccacctcattgaacacttttatgtaaagcgcaagcgcctgatcatagttcttttgcaaggacagaatctctgccgcaaccagatcacagtcaccgaaggaagcgccttttttctgcaatgtatccagctcctgctgtgcctcttccagctttccatcattggcaagtgcaatagcaagccccccgatagctttcagtacctgctccctgtaaccggacggccgcctgcagttccagcaccgcattggcgtaatccttatcataatacttaaagatcgagcagatcgtagagtaccccactctacagccactattcttttttagattttacagctaattccgcaatcggtcaatgaaaaacactccaaaatccaatttttttggggggaaaaattgtttgacgcaatcgacagtattgcccaaaacccgacaatttgattgtatgctccgtcaaacaggcccattaaacaaaaagaattgtatcgccgatgcaggcgttgggcgtggatatccagaccatccagagcatcgtaggccatgccgataccgagatgactgagcatgatctccatgttcaggaatccattcggcagagtgcggtccagttgttcagcgaggcgttttcggcctgaaaattggacggaacggcacgaattatcgcgagccagcttttcaaatcgttggcatcaacgctggctcgcatatcgcagcagatgatgttgcgtcaaaaaagcccacttgcccctgcgattgaccagataaaatctttggcattgtggtcaaaattgtggtcaaagccaaatgaggccagcctataaacaaaaaagtccaacgatttctaacgtgaaatcgttggacttatggtccgagtggcgagaatcgaactcacggcctcttgaaccccattgtgctccaatcgcggacacattggtcaaaacggcacacactatacgctatatcaccaattttcgaatccgttttttcatcctatttcgtttgatgtcaagaagtttcgtttctattgtggtcaaattgtggtcaaacgacctcgacaaatgacttttatcccctgctaagttacatcgcgcaatttcgattttcacaaatcgaagttgcgcttttttatttgcacgaattatctataaggaggttttttcaatgatgttgatgtatccgcgttatttttttagcattgacagaatcatatgacacttgattatttctacggacaagccggagagctgttttcgttcttccgtattccaaaggcgctgtttcaggagcagcggtttcaaaatctgtccacagatgccaaaatactgtatggcatcctgcttgaccgcatgagcctgtcggcgaaaaacggttggcgggacgagcagggccgggtgtatatcatctacaccgtccgggaagtgcaggaatccctctgctgcgccgaacacaaggcggtcaagctgctccgggaactagaggacatcggcctcgtcgagcacaaacgccgtggtctgggcaggcccagcctgatctacgtcaaggatttttcgtctggactgccaaaagcgcaagtacagaattgccaaaacagcagttctggtgctgccgaaatcgcaattctggaacagccaaaaccacaagcaaataagactaataagaataacactgaaatgagtgagactaatcctttctattctgaagaagcagaggagatgagcaagcgcgaacaactgaaagagtacttttctcagtctttggaggtagacctcctgctccggctttgcccggacgatgaggataccatctatcagatcgtagatttgctggtggacacctgcgctaccaaccgtaagctgctgcacgttgccggggacgacaagcctgccgaggtggtacgcagccggtttatgaagctgaacgccgaccatatccgttttgtgctgaagtgccttgcagagaacagcagcccgatccgtaacatgaagcaatatctgctcgcatctctgtacaacgcacccaccacgatgcagctttcctaccagaaccaaaccaatcacgacttagcgaatcagaggtgatagaaatttcaaagaaagcaaccacgattgccatcgtcaaccagaaaggcgatatcggcaaggccgttcccctttccgcacgttctgcggaaatcagtaccgtaggcgaaagcctaccagtctttgacagaggaggtgttggcgaatgacgaaaggcggcttaaacgtgtcgctaaaaggtgcagatgacatcttttctaccgaggaatcccggcaggagcagcaacgggaacaggtgcagcagattccaattgcggaactgcacccattcacgaaccatccctttaaggttttagatgacgagtccatgcagcgcacggtggagagcgtggagcagtacggtgtgctgtctccactgattgcccgcccacgcccggaaggaggctacgagatcatctccgggcaccgccgtcagcacgctgcacagcttgccgggcttgaaaccctaccggtcattgtacgcaacatggacgataacgccgcagttttgctcatggtggactcgaacctccaacgagagaacatcctgcccagtgagcgggcttttgcctacaaaatgaaacttgaggctctgaaaaagcaaggtgcccggtcagatttaacttcccgacaaattgtcgggaagttggagacggcagatttagttggaaaaggaagtggagaaagtggcagacaagtccagcgtttcatccgcctgaccaaccttatccctgaactgctgaacatggtggacgaaaagaaacttgcattcaatcccgctgtggagttgtcctatctggacgaagcccaacagcgggattttttagaagcaatgaacgatacccagaatgcaccgtccctttcccaagcacagcggctcaagaagttggctctggagggtcacttctcgtatgatgctgcctttgcagtcatgggcgaagccaagaaggatgaactggacaaggttgtcatcaaaaacgacaccctgcggaaatattttccccgcagttacaccccaaaacaaatggaggacaccatcatcaagctgctggaacaatggcagcgcaaacggcagcgacagaatgaacgctgacccacaccgcaacgaaagaccccatagggtctttttcttttatcgaaatggagaaacgcctatgaacaacgattctacccgtaccatccgttccgaaggagtcgccatggtgatgcacagtgaatgaccggcgtgaccagcagcttcacttccgggtcagcaagccggagttggaacgaatccggaacaaaatggaatccagcggcattctaagcattggttcctacctgcgcaagatggctctggacggatattgtctgcgccttgatctgccgcagctgcgccggatggcatatcttttgcagatgtgtagcaacaatctgaaccagtatgccaaagccgccaatgaaaacggtcaggtctatgccgccgatttagaggacttgcgcgcccggctggacgaactgatcagcatcagcaaacagatcctttcgcaactatccaatttttgatttttaccgcagtcggagggctgcggttttacataacggttgatatccttgctccacagtagccgatacctttataataggctgaataaaaatggttgtgttcaatatactgtctgcgctgaagaagattgtccccttccctgcatttctctttgtaattttgatgataaaacagccgctcaccccgtccagctatgtggccgggccgcacagacgaaaagagcagcgctgaaaacaaagttccaataaacgacgacagaccaaagtccctccttagagaagaactctggtctgtctcttcgttttgttataaaagcgtttggaacaaacgcgtagcctgcatcggcacgatgcagaacacatggggtttgggcacagcccaacaagcattttgaatttggatttcaaaaaatccgattcaaaaatcgcgagttggtaccagctcgcactgcttgcagcgtagatattcccgtcaacctctgcgtcagaaattttcaaatcacttcagctttgcaaggatctcgtctgcactcacgccgctggccagcagttttttcagcacgtcctctgcttcagctttctttgcagattctgctgctttggtttcggctttgacctttttagcttcgattttgacgatttccttgccgatagatttcagctctgctttcttggttttcaggtcagctttcagcgtatcgatgttcgcagtaatggatgcaatttcggcggaaacggcttcctttgcggattgcttttcggcgagctgtgcagcaaagtcaacagttgcttttacggtcttgggcttattcttgcttcctttgggacggggcatagaggacacctccattcaatatttataatacaagtatagcattacaaatattggatagcaagaaatttatatcggcaaaatatgcgttagacaacgtatcccttggccttgatgacctccacaacctgagacacatacttctggcaggtgtcatggtcgggagcctccaccatcacacgcacaacaggctccgtaccagattcacggacaaggatacggccagtgtcacccagtgcctcggctacggccttgactgcctcctgcaccgccgggtcgttctgtgcagctttcttatcagtgacacgaacgttctccagaacctgcgggtagatcttcaggggctcagccagcttactcataggcatcttctttgccagcatgacttccatcattttcaggctggtcaggatgccatcaccggtgctggcgtacttgctgaagatgatatggccactctgttcaccaccgatacggcaaccgttcttagccatgtattcgtagacgtacttgtcgcctacggcggtctttgcgtagtcgattccctgctcatcaaaagccttgtacaggccgaagttggacatgacagtagtgaccacggtgttagtcagcaacttgccacgttccttcatatagcagccgtagatgtacaggatgtggtcgccagtgatgacattacccttttcatccacacacaagcaacgatcagcatcgccgtcataggcgaaaccaacgtccaagcccttctccaccacaaacttctgcaggtcctcgatatgagtagagccagcgttgttgttgatgtttagaccgttgggcttgttgttgatgacataggtatctgcacccagagcatcgaacacactctttgcaatattccagcttgcaccgttggcgcagtccagaccgaccttcacgcccttgaaggaatagatacccagagaaatcagataacccatgtagcggttgcggcctgccacatagtccacggtgcaaccgatgtgctcacgatgagcaaagggcagctctggccagtccttatcaaagacgtgaagtttgccatcgatgtagtcctcgactaagagcaagatctcctccggcatcttctcaccatagcagtcgatcagcttgatgccgttatcgtagtaggggttgtggctggcagagatcatgatgccgcagtcaaagtcgtccacgcgggagatgtaggccacagacggggtggtggtgacgtgcagcaggtaggcgtctgcgccagaagccgtcaggccagcgaccagactatactcgaacatataagaactacggcgagtgtccttgccaatgacgattcgtgcaggctcgttgttgccgttgcgctcacgcaaagcgttatagtaccagcccagaaaacgaccaaccttgtaggcgtggtcagcggtcagagtaattccagcttccccacggaagccatcagtcccaaaatactttcccattatagcttttcctcatccaaagagtgaatcaacgtttatatgctttagccggagtataatccattgtctgccgctcaccacggagaggcagcatatttgagcagcacagccatgctaatgcatggctataattttagagtttttcttccagtatatctgcaattcgctcacaggcatgtccatcgccatacggattgctcgccttgctcattgcctcatactcatccttatcagacagcagacggctgaactctttataaattgtttcttcttccgtgccaactaatttcagcgtacctgccgcaatgccttccggacgctccgtggtatcacgcatcaccagaacaggcttacccaaagaaggcgcttcctcttgaattccgccagaatccgtcagaatcaagtaactacggctcaggaagttgtggaaatccagaacatccagcggttcaataatgtgaattcggtcgtcatttcccagatactcatttgcggtttcgcgcacagcaggattcatgtgaatgggatagattgccttaacatcaggatgctcatccatcacacggcggattgccttaaacatgtgacacatcggctcaccgagattctcacggcgatgtgcagtaatcatgatcagacggctgtcctttgcccattccagttcagggtgcgtatagttttcccgcacggtggtcttcaaagcatcaatagccgtgttgccggtaacatagatgctggctggatctttgccctctttcagcagattctgcttagaaagctctgtgggagcaaagttgaatttactgataatggaaaccgcctgacggttgaattcctccggatacgggctgtagatattgtaggttcgcagaccagcctctacatggcctacaggaatctgcatatagaagcaagccaatgcagtcacgaaggtcgtagatgtatcgccgtgtaccaatactacatcaggtttttccttttccagaacagccttgatactattcagaatattggtagttacgtcgaacagcgtctgcttatccttcatgatggacaaatcataatctggggtaacatcaaatgcctcaagaaccatatccagcatctgacgatgctgtccagtcacacaaacaaccgtctccaattctttgcgtttcttcagttcattgacaagcggacacattttaattgcttccgggcgagtgccgaaaacgagcataattttcttcattttaatttcctccgtgtttggctttttttacactaaaatataatagtattgtcaaactcatttcaccaattggtgctgcaaaagaaaccccataaatgcccaaaactccacccagcaggatattcattccaaccgttattagtgaaccgattgtaaatgcacggctgtataacttttgatttccgcttgcaactaaaaactgtattcctataaagttattgattacgctgaacagcatccaaagaacgagcggaattatgattgcagaatattcaagataattcttaccaaacgcaatcagaatcagatggtcccgaagaagtataattgcaagtcctgctaacgcgaaagctggaataacgagttttgcagcggtggtgactgtcttgcgcccactttcaaatgactttgaaaaacaaacgctaatgtgcggataaagtgcctgactgatcgggctaaaaaacagcaccataatatatggaattttatagattgctgaataaattccaacaatacttggcgttgcaacagcacccagaacggttgttccaatcccactaaaaattttggacatagcctgcgaaataaacaaataccagccatctttgatttcgctgatagcatctgcaatcttgcagagccttacttttaggccatatttttttcgtgccagcaggattcccagagcagcagaaagcaggaaggttatggcgtagcaaatgcagtacagatacaggtgattttcactgtgtaccagtgcaaaaaccattagtaccgagaacaagcgtgaaactgcattgataatagcaatcaacttcatgtcctgtttgccttgaaaaagccatgtgagttgaaacgcaacgcctagaataatcagaaagaggatgttcatactgacgtactgcgcactgcttgcgtgcaaagctacacttagaatattcattgcaaaaaatgttccgcacaacaatagaattcttgcggtaataatcctgctgtacagttcttgcaggccatcatctccgtgaacagaaactttacgagcacccgtgaagccgaaaccatattcaacgatcacctgaaaatacgtcacccaattaagtgcaagggaaaacacgccgtaattagatgttccaagaacgcgcgtaatatacggaagtgtcagaagcggaacaatagtattgaatacctgcaaaacgatcagccatgcgctatttgctaaaacctttgatttgaacaaatctgctagttttttattcatctgatatctccaaaaactcggctgcggattttctgatttcgtccatccggcaatcaatctcttcataattcaaagtgctgcatattttcagagggtcttcgatattctgatatgcggcagttgcaccaacactttccagcaatccctttttgcgagtgtcgtgatgattttgctttgtgtccaaacaagaaaactgcttatggaaaatcagagaaaagagcgttccatgaaaagaatccgtacagatataagaagcgttggcaatcaagtttacaaattctcccggtccagcatcaaaaaccgttcctttacgaaagctgttaggaccaaatcttgcattgattactttcagctctaagccgcgaccttttgcaattttttgcgcaatcgcaaattcttcacggaacagtttcttatggaggaagtagcaaatcagatacggctttccagatggttgctccaacatattgttccaagtatctgcccgcagcaacataacagggtcgcatacgacggacaaccgtgccgccgtttctgcatcaaactttccaaggtctttttgttctcgaattgagatttttgaaaagtcatccagatagcattgaatcttttggatatcatctggcgaggcattaccagtactagccgcgtacgcgattttttttgctttagttttgaatggatacagaaaagctatctcaaaatcattgatgttagggttcagcacttgatcactaccagaaataaccacgtcatatccattttcttcaatatattgctccaacgattccacggtagaaaaatgcggagtcaaatgaagattcttttggcagaagtctacaaatcgggcatgcttttttcggatactgtgcgtaaacggaagcagacagatatttgcaaccgcagttttgacagaggctccatgctttacaacgtcattgtttttctgctgcttttcactgacaaaatcaaaaaccgtgactgcatatccttgctgggataagtatgtctgcaacgcatagcactgaagtaccgcaccgtagttctgcgcgaaatggtatgtaataattccaacttttttcattttctttttcctgtaaaaagccgtttgatataatatttccaacagcagagaattgtaactgttttgggtggaatcccgctgcacaacagcttgtagctccagtctctgcatttaggacgtttgacgggatgatgatatggaatattgtgttccaacgctgttttgaaattgatttttccaatcaaaaagacttttgtttcgtccaaaaaacatttagcttttgaggtattacagagcaaaaccgagcacccacgctctatgtccagtccgttaatatccgttttccataaatcgcctgctgtaaaatcggcagttcgcgcctcatttgcgtactgacagctgtaacaggattccctcaaaaaaatctgccgttggaaagacagcgacagcggatcttcctcaccaatcagatacactaccttgccattcttgaattcatagcggttcagataattccgaccaatatagcggtcttttgaacgaaaaacatggttttgaacaggtgagccatattttgcagccatttccgaataaaatttttcgataacggttttacttggaacaccttgacacaaaatctcaaacgtaagcaggtttttacggtttattctctgcagattccggattgcagctaccatacacggcgtacccgagaccaatgtgagtcctttttgtgtactctctatgatttcaccatacgctttttctgaaatagcgcactgaaaatattttgatccagtcagttcatcaagttctttaagcgaggtagctttttgatatcgtaattctgttccaaaatccactacaccaaaaatcgcaccattctgctccagcacagtttgtgcaattccataaaacgctccgcctgaggcacagtgccgtaacgtagttttatttatcaattgaacagcataacagtcagcaaaatcgccaatcgaaggcttttttagcgaaggacaaaccttattgcacaggttgcaatctacacataatgacctatctactttagggtagagaaagccttcaacagactctaccatattgattgcgctctttgggcagctataagcgcatactccgcagcccgtacaattttcttttttacaattcagcatatagtcgctctttcttgttaacgatgtataacaatgcgtacctttcgacctttgaaaagttgaaccataaggctgatagcaacgagtataacaatcagaataaggtagacatccatactttgcgttaaaagaaccatcgccaagataagtccaatagccttcgtgtcgatatcctttgaccgatcaatcatattgcaaatccaaaccagaaaaataattccaactgcaaatccccaaaagccaaaattgcaaattgtcatttccaatagagatggcgttgtccccgctggcagattgtgaatactcaaattcaatatagaaccggtcaaatacatgtaatgtggatatggtttgctgggccacatttttcgcggtataaaagcaccaatcaaacttaaaaatgtctctccacgatactccaaaatacgctcaccgcgaatgatttccttgttgatcacatacttgataacatcatcccgcccgaaatcaactcgtagcatatcgtagatactcgatgatgatgtttccgccattggtctgattactgccaaataaaagatagagaagccaatcaatacaattcctaatattggtaatgctttgtatattttctttcgaccttcgacactgatgtccaagtttactgtatagaatataaataaaagcaaaatattggcgagcataaaacgttttcccgatatccagacaattgccaccgagtaaaaaagcgttagaataatttttatgacggtaagcttttctttaaagactgtgccaaagtaaacaaccatacttattaacatacatggtgtcataagagccattttgtttgattccgttaatcctcttgcactcgaaacggcgtaaaccgcataatatttccatgagcctgttaacgcgatataaatgatagggaggaaaatcaaaataattgaaatgactctgttgtcacacagaattgaagtcaacgagttatatggtgctaaaattattctcctcttttttcttccacaaaatatataaaggaagataatgcacagcataatatacaaatcatatattatactaacctgttcattgtgcatgggttcaataaatggtttataccaataagctgttatatactgtggtagtccaaccatatagttcaaaatgataggaagaacgcagaacacataaagaacaataatcacatagtttgccacagaacaattctctcggaatacaacacgcttatacgccaacagaacaatccctgttgtggttaaaatcaaaaaacaatcaaaaaagaagttcatattatttttcaatctttcccatcaattttttcatagtctttagattatctgttccagcaaagaatttttttgcgttttcagaataggtgtcataatctgcttcaattttctgaatcgcgtgaatgatattatttgacttcagctccatgcattcagccgcaccagcattgccgaccgtgtttttcagacccggaatgtcatttgccagcatcgggatgccaaagccagaatattcgtaaattttattcggtgcacagaacactttatttaaagaatcattacgataaaaaactatgccaatatgtgcatagctggtaatttccagatgatacggtgctggaatatagctgacatattccacattgctataaattgctttgattttgtctacgctatggtacttatcaattcccatcagcagcagagtatacccggcatccatcgtttgcaacgccttagcgacttccaaaatctcgtccgtgttctgcaaaatcccctgatacagaacaacttttttgtctttgattcgttcaacgactgcttttgtttcaggaatcgaaggttcgtgacagcggtcagtaatctggttgtaaggcttgttcgggaatacatacggcacttccggaagactccaccacgaacgcatgatatagccgcgagtttcctcacaaaccgtcacggcggctgcgttctgtgcaagatttttcagcagtcttactttctgcgggcagtcatccagaagttccagcagagagagcacgtacttctttccgttcaatacacccttcatagggagtgcgctttctgccgttccaaaccagagcactgtatcttccgggtactgtttcaaagcattcaacactccgcagcggaatttataccaatcctgcaatttttcaattttagaacttgccacatctttgatctcagcaactttgtggcagggaatattctcttttgcaagaagctttaatgcactctcattcgatgttccatatagcacttccacatcatagccaaggtctttcagcatacgaatctgcgaaatgcaggggggataataatgcagctgtgtctttacgatatataaaactttcatgatagcgttactcctgtttgttaattgagtttttataaagttcttccagctttcgtgcttcggtttcaatgttgtaaccagctttggtcaacgcctcgatactatcatcgctgtgtggctgtgcagcatacttcaggatttcttttgcccattcatccgctgatttctggatagaaaggaaatgtacattggatgtcatggcacagcgatgatccacattttccgaaatcaggcacggcaaatttgctgcttgtgcttcaattgataccaccggaagcccttcataaagagatggtaaaataaaagcgtccattgcctgatataattcattcgtatttgtaacattacctgtgagcacaacagaattttccagatgcagttcctttattttcgcaaggacttcacctcgcagttcaccgtctcctaccagcaaaaactttgatgcaggcgtgatttttcttacagcattaaaaatctctaaaacaaacgagtgatttttcggtgtgcaaaatcgaccaacatgaccaacacacaaagcatcacctattgcatacttttcgcgtatcatctgacgtgttttatcgttcctttgaaaccgctgcaaatcgattgcattgcgcatcatataaaccttttgatggtctactgcatccgttccgtacaaaaacacgccggcatcatatccacacgccatccaaacgttagctgcaagacgattcagacttttcaaaattggaaatgccagttttgcttttaagttatcctctcggaaggcactgtgcgcatgagaaatgcgtacccggacaccaagcatctttgcaaggagcaaaacataaaaatttgtcagtgtcatgtgactgtgagcaatgtcaaagtgctcttgcttcagcacttgataaacctctccgacatttttggcgatgctcttacgtttatgtgttacaatatgaacggtatagcctgcatcttcaaattgacggatgcagtcgtcatcgttgatgtcctgcgtgataatgtgaaggtcaaactgctccggatgctgaaagtgggttgtatagttcagcaacatagcttctgctccaccgaattcaaggcgtgatataaattctgcaactttgatttttgaatccatttattttctcctgcctattacatagatcaaagcagtttgtagtagaatctttctaatttttctgcttcagtaacaatatcaaaacctgcttttcgcatttccgcacttgtgtcttttttctgataatgagatgtactctctaagacagccatcgcccaattcactgcagattcttcaggtgaaacgaatgccgttgactcaagaatttttgtttccggtgttaccacatcagccatgacgcaaggtactcctgccgcctgtgcttctacaccaacgaccggaagcccttcatatcgggaaggcagaacaaagcaattcatggcttgataaaatttacttgtgtccttttgcttgcccatgaagcggacactatccgttaaacctagtttcttgactttgttacggatgtcctgttccagttcaccttctccaatcagaagtagaacggcctcttggcgttgcttgtggatttcgttgaaaatgtcgatcaggaagtcatgatttttctggtaacaaaatctaccgatatgaccaacaacgagcttgtcttccaaccctaattcttttcgcacagtagcagctttctgcgggtcgtaggaataacggctcaaatcgattgcgttgttgaacacctgaaactctgtgttttttccataaagccattcacctgcatattgtgagcaagcgcacaactttgttggatagattttagcaaacggtcggagcgcatatttaataatgttcttctttgtctctcctttaccggctgtcgagtggttgtgcgcaatcctgttcggaatgcctgcttttttggccccccacaatgaaaaaacactaagtgtattcatatgggagtgaactattttatattggttttgcttaaaaagccgaatgatttccttctcatatgccgaaagatgcgtgtacttcggcacaatataaacccgtccgccgagtcgctcgatttcttctctctgaggtactgccgagccttccagtgcaaagaaatcaaactgaacctttgtccgatcaatgtgtcggtagtagttcataactaccatttccacaccgccgtagttcatatcggtcatcatctgcgcaactcttataggttctgtcatgctatcccctttgatcttgatgcttttattactgtgctccacttttcttcaggacgctctctacggttttaaacaggattttgatatccagccacagcgaagcgtttcgaacgtaatacatttccattttctgccgttcgccactttgataggtcgcattatttcgcgcatacgcttgccaatacccggtaacacccggctttacagccagcagtacatcgtgggtatcgtcataataggtctgaatttccgactcgatcagtggacgaggccctaccagactcatatcattgcaaagtacattgaaaagctgcggcaattcgtccagactggttttccgtaaaaagtttccaatcttagttatgcgtggatcattgtcgattttgaattccgtgtagtactgctttgcctgctccggcgtaagcagatcgatcattttatcggcgttcatgtacatactacggaatttccacatcttaaacggctttccgtttttgccgattcggacatgaccgtagaacacctttcccggatcatccacataaaccaaaattgctgcgatcaacatgatgggtgacaaaatgattaaagcggcagcagaggccacaatatcaaacgctcttttcacaaatgcatagcatcgccgttttacacctggtgattcttgcacataatagttcatagaaccgtttacagttgttttatttccagcaatcattcaatatctcctcactcgatcatcccgcctgagcggtttccttttcgcaatttgccacaagctcaatcgttcctaacagcacacaaagcagttgcttttatctttcgtttgacttgtttcaacccgcttttgccgtaacggtttcggcttgcgccgtctgtctagacgagcgcttcgggttgcttttcccccaccgcatcccgatggcatccagctttgcgatccgttcctctgtcaaaacagcgccgcttttttcagaattctggcgggtataccgctgccgtttgacccaatttccgaggttgtaaccgcccggtgacacatattctgctgggacgttcaggtcgccgtgggcatcaaaatagcgctttgcctcctgatacccctcgttccacttgcggtcattgcgattgccccagtacatcccgatccggctgagccgctcgacctgttcctccgtcagttttcctttcgggtacgcccattgctggctttcgacccattgtcccagccgttcgccggccgctgtcacataggaacgtgggatattcaggttgccgttttcctcataataagccgcagccagcgcataagccttttcccacttggcatcgaaaatgttccacaccatgccgatctcatcaagctgtgcgatgcgttcttccttcagtcggccgttcagcttttgctgccgggtcttgatgatccactgtcctaagggatagccgtccggatccacatactttccgggcaccatcaggtttccgtaggtgtcgtggtatttctttgcgacctcaaatccgtgctgccacgcaatttccttccggttgccccagaccatgccgatgctgtccagccgttgaatctgttgttcggtcaggatgccttgaatttgtccctcgcgcacacgacgctgagtgaccagccacacgccaaggctcagaccgccgggcgtggtatacagtttcgggacattcaggttgccgtgttccgcatagtagatgcttgcctcggagaagtagtgctcccaaccggacgaaaggctcgcttgcagctgctcgaacagcacccggcaatcgtgcacttgctcgatgacctcaaaccgttcggtcacaatcttgtcgccctcgccgttggcatagagccggtggaccgcctcctgcatctcaccttgcaaaccggaaatactggtcaagccctcgaaattgttgacaacatctaggataagtggtgtcgtattatcaccagcggtcagggcacgtccgatctgctgcttgtagataatgggcgaaatcgttggtcggaacaggatgaccccggaaattccctccacatggacgccctcgttaagcatatcgatgcagaacagcagcttgagccggtcactggtatcagttttgaagtcggcaaacgccttgtccgtgttagggtcatccgagtaagcctgatacaccaccacatttgagttgaccccggcgaaccactccggcacatgggacaccatttcgtccatatgctctttgttggcgcagaagacgatgtacttgccagacttatttgtgatatgatgggcaaagaccctgtccaagccgtccgcctgctccagtgcccggcgcaaggcatccagatatttctgattcacatcctgaatgcccggtgtccgcaggttatccacccgcgcctgatactttgcaagggctttctggtactgataaaccgtggtcacatatttcggggcaggcaaaatgcccctgacgactgcttcgccaagggtcatgtcgctcgccgtatgcccatcaaagagctcttcggccatgtcacggttattatccagataccggatgtttgttgccgtcagccccagaagctttgcctccgggcataactttaataaagccaccgtgctttcgccccagcattccgcaccggcacggtggaattcatcgagtataatataggcaggcttctgcgctgcaattttctccagctgcgcctgtgtacagcacatcagtttggcataggtataaaagtgaacatttgacaatggaaagcccgggtcgttctttttcaagctttccaactgggttttgaaaatgtattcactgggagaaagccagatcacgaccttctccgggttgtcctcgatcagcttgaacgcaatgtagctctttccggtgccggtgggatgaacaatggcagctttgccatactggtccatcatccggactgccgcatgatatgctttctcgttgtgttcaaacagacgcaatgccaccctgttcaccccttcccgcataaaggggtatccttcacatggaaaatggaggataccaatctttcgacatcattgtttgaattctcctattattttatcatggttatatctgggaatcaataggaaactgtacaaatgtatcccacctgaccttagaaaaaaccttatagaagccgatacttttttgcacattgcccagttctgcatgaaaaatccagcaaaaaacgaaggcggacagaataagtggtcagatgggtgtccaagacgcaggaggaaacagaaatggcacgacggggagaaaacattcataagcgcaaggatggtcgatgggaaggccgctacatcaaagcgcgtacatcggaaggcaaaattcagtggggctacgtctatggcgcagtttatgcagaggtcaagcaggtgctgattcagaagaaagcagaggcaggcttctacaacctgaaaagaaccgaccggacctttgaagcactggctgaggtatggctgcactcccagcagaacagcataaaagaatccacctatgcgcattattcgtacacgctgcacaagtatcttcttccggttttgagtaaagtgcccgttgcgtcccttgacgaaagctttctggaacaggccatgcagcaaatcatcgcgcccacagatgccacgcacaagccgctgggaaattcctctgcccgggaatgtctctccatgctgcgccgtatctgcaaatatgccgcgcacttacgcctgatccgtccgatggaactggaagttgcgctgccaaaagctgttgataaaatatctgtgcctctctccccggcggaacagcaacggctttatcaatatgtacaggagaatccaacagcacgcaagatcgggctactattggggcttgaattaggtctgcgtattggtgagatttgtggcctgcaatggagtgattttgacctgaaactcggaacgctgaaaatcagccggacagtctgccgaatttcctgcggaaacgggcatacaaaggtggttatccagacgccgaaaacccgcacctcccgccgggaaattccaatcccgaaacagttacttattatgctgaaaaagctgcgaggaaacgccagtaatgccacatggtttctatctggtactgaatccaaacccacagaaccccgctgctaccggaaaagcatcaaggcgtatctgaaacaggcaactgtccggcaagtacgtccgcacgcgctgcgtcatacctttgctaccacctgtttgcaggcggggtgtgatgtaaagaccctcagcgaattgttaggccacgccaatgccaacattaccttgcagcgctatgtgcactctgatctgacccgaaagcgccgggagatgaaccggatattctcccatcaggtgtctatgaagagtaggaaactgataaatctgattgaataacgccaatttttggccataaccttccattttccatgtggaggatacttttttgtttttcgataaatatacttcctcacgattacgcaattgcgtattccctatactatgaaatattctcgcattatacgcagtcgcgtataacaaacagcacgaccttctgtacccttgctatcacgctggcagggttcttttcctgcgccctgtttgatgaattggagcaggagatccaccaaatcatcttctttttagcataataaaaaaggcaccggaacctttcctatcctttggaaatgtagaaagctcaggtgccttttttcgtttttgaggttatagtcggcttaataggcaaaatcaacaggaatccaaccaaaatgtgacaactgcgtaattgacaatcaaaaccaaatgcagtataatcaaattgtagacatctttttggtgttaaacactccaaatcaaactaccgcaaaaccgtctaaaaagtgaaggaggtattccaatgcataatgactacaggttccaccgtgagaaatacgttgaagtggacgtctgctttcctcctgtggcaagatacaggtcataagaggcatccccgttcactgccacccattggacatcatccgttttggagaataaatatgattcagtcaaacaatcgctcttttgcaaacaatcgttcttttaaaaataaaccgctgagcaatatacagcaggcgcaattcagcatcggctggaggttttgtcctgtttgcggtaataagctatacaaaaaaattgatgggtgttccggtacactgcaagtaaaatgcagtaaatgcaaggagactctgaggcttgatctggcgttcagacgccggtgattttccagtcattttaacaaatacgggtgcattgcaccctgaatatggactgttcgctccgagcaacgggccattgccgcaaggcaatgaatgaaacgcgctccaaatagccgggcaacagctgattgagagattttctttgaagatccctcagttggctgttgtccggctatttttttagccttcaggaagcctgctcccgtaaaaaggagcaggctttatgtttgtccggttttcgtggatgccccaagcggcgaaatatccgtagccttccgaattttcgactttttacgctttagcgaaaatttggaggttacatatgagtttcaataatggtaatgaacgtcgcaagctgaacgcagagtgggagcattttcgtgtgcagtaccgtgaagccggaatgagcgaagacgcaattcaggctatgtatgagtttgatctgagcgttcttaacagtgaacgcgcctatgctgccaacacggtggcagtcggtgatagctataatgacgatgacgcaagaaaagcagctgatcttaagcaatatggggctgcgatcacggtaacggatacctaccacgaaaccaagagccgctttggatggatcggcgaaatcgaggacgaacggctgctgtctgctcttgaaagcttatcggaactcgacctcaaaattcttacgctctatgtctatgccgggtacaccgagtccgagattgcaagtgccttggaatccaaaaggattacgattcataagcgaatcgtacgaatgactatgtttttaaagaacttttgaacttttttctttttcaggtaacaatttgccccctctcgatggctcgtaagtgaagagacaatttcccagacggcacctgccgcagggcaaagcgtccgacctcacgcaccttgaaagttgaatagttccgtcatctggtactccgataatgatacttccgtaattcgcggcccggtcacaaagcagacggggtggctgaaatgccaatgaagcg

SEQ ID NO: 13910 - DNA, 183 bp, Unknown
  gut microbiota DNA sequence
catgccccactcgcagggagccgagggcgaatatgcgagacctttaatcatattgatccgggaactgtcgggtacgttccacgcatccggcagttcccgttttttacgtactcttatttattctttatccgaatattcacttttgatacataggaggacacttttatggacgagttgaacccc

SEQ ID NO: 13911 - DNA, 386 bp, Unknown
  gut microbiota DNA sequence
acaggaaatcgctgccccgtcctttgagcagggcgaagaagcctactcgccccttatgaacaagtatcaggaagccatttctattaccgaacactaccgtgaaaccaagagccgcttcacatggatcggcgagattgaggacgagcggctgctgtctgcgcttgaaaatttgtcggatgcagacctcaatctcgtcaccatgtacgcctatgagggctacaccgtcactgaaatttctaaagttttaggcgtcgcacagcctactattagcatcaaaatcaagcgaattactaaatttttgaaaaacttcaatttcaatgctatggattgacccttctcgatgcctaccaagtgagaggacaattcaccagatggcgaaagccgct

SEQ ID NO: 13912 - DNA, 2091 bp, Unknown
  gut microbiota DNA sequence
tctgttctttttacttattccatatatccacattttcgtcctacataataggaggctttatgaacgaaaacgaccgtaccaccttagagcaagcgatctacgaggaaatggaactgaccccggagatgattcggtccatccgcacgctctgcggtgtctgcctttgtagttttgtagaatccaaggcgttcaaaatcgccattgttcccagcgcagaccggagcatggacacttgcacagtctgccagacccggcgcggtcatgactacgttgtgatgaaccgctgaacaaacacaccgcccactgccaaggaggtgcagcaggcggtgtacatattgaaaaaggagggcagcttttgattcaaaactggaaattccagcgtggagacattttcttcacccgtttcgacaacgccatcggttcagagcaaagcgggaatcgtccggcagtcgttctccagaacgatgtgggaaatttttactcgcccacgctgatcgtggccacattgacaagcaaggcggcaaaaaagtatacccagccgacccactgcctgctggtgaacgagtttctctccgttccgtccatcgttcaggcagagcagatttttaccgtagacaagagcagggtgctgaaattcctcggacacctcaccccggaagaaatgagccgggtggatgatgctgtccgtgccagccttgccctgaacccgatgggaagcattcagcggcttccacctatcatccgctctacggcggcttacgcaccgcctgaggtggttgacggcaagccgcccatctatccctacacgcccatcaaatcgtcctttgaggacgctgggagcgtcgaggacatgatgctgtacaccgagttggaagctgcggtacacgcaatgatccaacggctggaatacagcttcacgtttaacccaagcctgctcaccatcccgaagcgtaagcagcaggttgctgaaatcctgaaagaagccgaaacgtacatctggaggatcaaggaggaaatgcgatgcgcctgaaagacaataacaatcccttcatccatgtcaacccgccgtaccagctcatggtcatccacagcagcaagctggtctacccccgcgaactgtaccagcgtggtgtggagcgaaagcgtgtggaactgattgccgcccacttcaacgagtatgtggcaaacgagccgaaggtcagtttccgcaacggtcagttcatcgtaacggatgggcagcacaccatcgaggggcgcatcctccgcaacggcggcaaagatctgccggtcctctgcaaggtgtacacgggcatgaccgtggagcaggaagccctgctctttgccgagcagaacggcttctctgcgccgctgacggcaggcatcaggctccgtgccaaggttgtgggcggcgatgccatttccaaggcgtttctcgcagccaccaaccgggtggggttgagtctcaattatgacagccagcagctgaccgattaccgcatcggctgcgttggtacggctttccggctctacaagcagatgggcgaaccgctctactgtgaaacgatgcggctcatcgtggcagcatgggagggcaagcccgattcgttccgggcatctgttctgaaaggcatgatgcactttgtggagctgtaccacggcgagttcagtgaagaacggctgctccgtgcgctgcgcagcatccacccggtcgatatctaccgcatcgggcaggacgaccccgcaaagctgcgcggatggaagaaatacgttttccccgtctacaccgcctacaacggcaagtgcagaaaagacgcactgccgatgaaattctgatattcacaggcattcctcccatatacacaaggggcatccgcaaaccgcagatgccccttgttacatatcaaagtgcaatatatagtgtttctgtattcatttaatacaacatatagagaaaagaggtattctatgcgctctcagttcacttcgtatgagcagcttcccatcactctgacagccgatcatgtcgctgctgcgctgggcatctcccgcgccaacgcttacatcctgctccgttcggacggctttcccacg

SEQ ID NO: 13913 - DNA, 422 bp, Unknown
  gut microbiota DNA sequence
gcaaaccgcagatgccccttgttacatatcaaagcgcaatatatagtgctcctgattcattcaacacaacatatagagaaaagaggtattctatgcgctctcagttcacttcgtatgagcagcttcccatcaccctgacagccgatcatgtcgctgctgcgctgggcatctcccgcgccaacgcttacatcctgctccgttcggacggctttcccacgctccacatcggtaagcggatggtcgttcccaaagaccgctttcttcagtggattagcgacagcgtaaacagctgatctgacatccttgattcaagaggtcgctttatttatactgattcacgaaacgacttgacatcaggaaggaggcaatatgccaagcaaacgttcacacggcgagggtacgcttcgccaccgcagcgatgg

SEQ ID NO: 13914 - DNA, 608 bp, Unknown
  gut microbiota DNA sequence
aagacggaaggggtaaccccgccgcactctcacccgtttttcatctgctctgcgtgcagctttccgtgctctacatagtgcgcggcgttgtgcaggttggcttccacctgcgcggcgctcacctgcttgatgacccgggcgggcacgcccaccgccaccgagttgtccgggatgaccatgccctccggcaccagcgcccctgccccgatgatgcagtttttgcccaccacgcaatggttcagcaatgtggcgtgcatcccgatcaaactgccgtcccctacggtgcagccgtgcaccagtgcgcagtgccctaccgtgacgttttcgccaagggtcacgcagccgccaatgtcgcagtgcagcaccgcgttgtcctgtacgttgctgtttttgccgatggtcagcgtgccgtcatccccgcgcagcaccgcaccgtaccagacggtggagccgggctttaaaaccacatctccctgcacggtagcgctgggagctacaaaagctgcgccctcatcacggggcttttttccacaaaaagacaagaacattgttaaaaaccacctttcaccctttttcttttggctggtttatggtattctttataaaga

SEQ ID NO: 13915 - DNA, 2487 bp, Unknown
  gut microbiota DNA sequence
cgatacttctgccccgctggccgcagaagccaaagaatacctgatgaacacttttcacctcgactataagtctgctgatatcatcattggctacagggcagatgacagctatttttcctttgcatccgattttatcaacggtgcaatctcttaccgccagttgtgcaatgccatgcgcttgggcaagctggggcagcagttcgtgctgaaaagcaaagcggcctttgatcagctggaatttctcggctatgagaccgcagactctaaagaatggtataagaaaaaggccttccgtgaccagacagcccgccgccaatattttgacgtggagcgcaaccgccgtcagaggggagacctttatattaccacgattctcgacgaggagatgaagcccaatgatccacgcttacgataaaagctatctttctgctgcacagaaaaatcttgcccggatgttggattatcttgtcaacgatctgcattatccgttggagatggcatggcagtggtttgtgaccagtgaactgtctgcccggttcgagcagggggattgttctgtgttggtgggcttgtccggtgtagaacttgcccgtgttgtattggagcaggcgggcgaagtcgtgcctatgcagaaaccctcgtatgcctacgactgcagcccggaatactggacaggctgggctcttgcctattaccagtggctgaccagtttgcgctttgcggagattgaacaggcagtgtctatcacgaaagtgcggctgctgtatacgccctaccacgagatggatgtacggcagtttgcagacaagatgaacgagttgtaccgtgcggcaaagccggaaacaaacctgaaagccatgcgcacattggccggattgagccaatcggaactggcaggacaggctgatgtgcctgtgcgtaccatccagcagtacgaacagcgacagaagaacatcaacaaagcacaagcagaaacgctgcttcgccttgcgcgtgcgctgaattgcaacgtggaggatctgatggagaaagttccaccgctgaattttaaataagaatgaagcgatgagacctgacacagattgtgcaaacaaaaaagaaagctgccatccatgagagaaaaattctcacggatcggcagcttttctctttgaagttgttatgccttcgttgtggtcagaacttcatcattgaccagctgattggccttatcaaatgcttcgatcatctgggtcgctttcggatggagatagacttcatccagcgttttggatttgggcgtgtgcccgacagcgcgtttcaggatatccttgttgacgcctgcgcggtcacaaaggctggcgtaggtatggcgggtggtgtagggcgtataggtggcaagcttcccggcaaactccggtttgcgcttaccattttcgtcgtaaggattcggctggatgccgatttcctccaggaaaggatagaacttacggttacgccagttcttttcgttccagaaaccgccttttccattgggaaagagcggaccgttttccacagaggtggcatacgcatgttcaaaaaccgggatgccaaagtcgagaatgggaatgatgcggttgcgtccggcttcggtcttgcagccgccgatcagataagcaccggattccgtgcggtgaaaatcttcgtgtttgaagtgcagcagctcatagatacgcactccgcaggccagaagagcaattaccatctgcccggtgggcgtgttcttctggctcaggatcagcgtcacctgttcgtccgtgaaaatctcgcgttccggagatttgcgtccttcgactttcaggacagatgcaaggttggcatccacgacacgccagccaatggctgtgcgatacagcttactgataagagtacgctctttttccaacatactttgagacaggccgttatcggccatcttgtctaagatgttttgaaagtcctgcgcatagagggcggcaattttgaagtgccacagtggacgaagatatttccacgcaatgtcatagagctcgcgagccttatcggaccggcccttatattcacgggactctttgaacatccggaagcagtcctgcagggtagagtcctgatagggtgtggccggacgcttcatcatctctgcgcggacagcttctgcttcttcacgggtgacgtaggtgccaacagccttcatgactgtaattccggtgtgaggatcagggatcggcattcggagcagccatggtttccggcgtgttccggacattcgtgtgatgctgccattgccagacgaggctttcagccggggcgattctcgtttggctggaacggcaggtggagctactgcaccgggggatggcgctgtgccaacgggatgaccgcaggcagagcagaatttagcgatatctgagatttgatgaccgcaattttcacagaacatagaattgaacctcctattgttttgaacttgcttcaaaaatgcccccg

SEQ ID NO: 13916 - DNA, 871 bp, Unknown
  gut microbiota DNA sequence
cttccattaccagacgatgctttcagccggggcgattctcgtttggctggaacggcaggtggagctattgcaccgggggatggcgctgtgccaacgggatgcccgcaggcagagcagaatttagcggtatctgagatttgatgaccgcaattttcacagaacatagaattgaacctcctattgttttgaacttgcttcaaaaatgcccccggcatctggaggatgccgagggcggatggtcgaattagttgcgggtgcgggagagctggtactccaggctctgttcagccgtgagccccttctggagaaagcggatcacattggggtaaaacacgtagatacgtgatccgttcggtacgtgacttatgtaaccggcggctacgagattgcggagaccgtggtatgttatatcataaccttcgctccgtgcacggcgtgccgcaccggttagtgtaagaaaatcctgttgcttatcaatcataatttttctctcctttcgtaaaatgatggaaagcacaggtggcttttcataataagcatatctttttgagatataggactcttaaagggcgattaagggtaccagggaagatctggcatttttgagaagtcataacgctccaaagaatgcaaatcaggttgtacttcctcatattgggtgtttaaaggaggaacgacatagccgcagttaaagaataggctctggtcacgcagcgtgatagcactacaatcgatgtatccacaatcgccggagtggcaacatggagcctctgtaaagtaaattggggcgcccatagttgaaagcagatcagcgtactcgggagaaacagggttttcaaaaaatccatccgggatgttcatgacaaatcct

SEQ ID NO: 13917 - DNA, 737 bp, Unknown
  gut microbiota DNA sequence
aatcagtaggccgggggttcgagtcccttccatcgcaccagaaaatgccgtgaaatcgaaagatttcatggcttttttgtttttctggcagaggctgcacacttttgcacatctcctgcacactttacaaaaaagccatgaactctttgcatcgcttgcacagcgtgtatttcgctgcacaaaaaagagaattttacgcgaagagtacccgcgtcagctcgcggcgttcctctgcgtccatctgccggatggcttcaaggatcattttacctgtgatttttgttgccaccggcgttttgttttccgggggttcctgcggctttgcaccggccacatcctgcgtgtagaagtcggcttcgatcttctcggtcaactccaaccggggtttgtcctgcgtgtgggcgtaggtgtccatcaggacggtggcggttgcatggccggtgttgccctgcaccgacttgaagtcaccgccagattgcagcagctggtaggtggcactggagtggcgcagaccgtggaacacgatcttctcaaactccgggtgctctgcccgccacatacgataccacttggtcagaacgtccggggcaatgggtaagccgtctggtaagcggaacagctgaccgcagttgctgtacttttccggggcgctctgctcgtcctgcttcatcttttccagccatgccagaagctcctctttcaagggcttggtcatgtacaggatgcggttggacttt

SEQ ID NO: 13918 - DNA, 262 bp, Unknown
  gut microbiota DNA sequence
ctgcagcagctggtaggtggcactggaatggcgcagaccgtggaacacgatcttctcaaactccgggtgctccgccctccacatacggtaccacttggtcagaacgtccggggcaatgggtaagccgtctggtaagcggaacagctgaccgtagttgctgtacttttccggggcgctttgctcgtcctgcttcatcttttccagccatgccagaagctcctctttcaagggcttggtcatgtacaggatgcggttggacttt

SEQ ID NO: 13919 - DNA, 320 bp, Unknown
  gut microbiota DNA sequence
gaaagccggtgtaccaaggcgaccttgatgatattgaaatgtacttcatggcggcaatcaaggaaatcaaaaagggtatcgggaaccattacgccgaacaggaagccatgagcaagaaagtggcagaaaaaatgtttacagaactgaccaaagggcaggatgtgcagcacccaacgattacggcagagcagttgacagatgcaatgttggacagcgtttcgggtatgaaaggagccacgccggaagcgctggaacagctgcggaacggtctgctgggaatcttgcagtctgccgcagagcaggaaaacgcccatgaagca

SEQ ID NO: 13920 - DNA, 1120 bp, Unknown
  gut microbiota DNA sequence
taccgcatatcgcagtattttgacgatacttttgcttccggcatcgcagcacagaacgccatgctcacgacattgagcaccctgctgcgcacaaaggtcaagacctcggcagcagctaaagccgcaaaggacatcagccttcggagaaagccggtgtaccaaggcgaccttgatgatattgaaatgtacttcatggcggcaatcaaggaaatcaaaaagggtatcgggagccattacgccgagcaggaagccatgagcaagaaagtggcggagaagatgttcaccgaattgaccaaagggcaggatgtgcagcacccaacgattacggcagagcagttgacagatgcaatgttggacagcgtttcgggtatggaaggagccacgccggaagcactggaacagctgcggagcggtctgctgggaatcttgcagtctgccgcagagcaggaaaacgcccatgaagcagacgaatgaacggctttgtgcgctggcacagaaaggcgatgcaactgcattggacagcctgatcgacaacaacaagtccgttatcggcaaggtggcaaatgaccttttccgcagcatgaatctggcacaggctggctcgaaccttgacacggacgatttgaaacaagcgggcagcttgggcttatggaaagctgtgtcgaagtttgatgcagcctgtggcatgaagttcctgacctatgcggctcctgccatccgcaacgccatgatggacatggtgcgggatgcctttgccgcttttgagcagcggatggtgacggaagacaaggacggcgtctgctaccagcgtatttcgctggacgatgttctgccgggagaagagcagctgcggcgcattgaagccatagccgacccctacgccatgcagccgcagagcattatggaggagcaggaatcgcgccgggaactgtacgatggcctgaaacggctgacccaacgggagcagacctatctgctgtaccgctatggcttcaccgatggcgaggaacatcccctgatcggtacagcgatatacttccacctgacaaagagccgtgctaaaaagaccgaggaacaggccatggataatttgtggttggaactgccgtggtggttcgat

SEQ ID NO: 13921 - DNA, 246 bp, Unknown
  gut microbiota DNA sequence
cggcaaggcggcaaatgatctcttccgcagtatgaatctggcacaggctggcttgaaccttgacacggacgatttgaaacaggcgggcaatctgggcttgtggaaggccgtgccaaagttcgatgcagcgcgcggcatgaagtttatgacctatgcggctcttgccatccgcaacgccatgatggacatggtgcgggatgcctttgccgcttttgagcagcggatggtgacggaagacaaggacgg

SEQ ID NO: 13922 - DNA, 3594 bp, Unknown
  gut microbiota DNA sequence
attatcttgtatttacatggatttacaggaaagcggctaccaattttagcagagagccggaaaacagagttcaaaaggtgctttatggggcttcattagctgggaacctgattttattagctggaaccgaaaattctgctaatggcattagctggctaattttggtgataggttcaaaatgaaaaatgcgaagatcgtctttcacatggaaaaatgaccttcgcattttcataaagggataccccagacaggattcgaacctgcggtctcctccttaggagggaggcgctttatccagctaagctactgaggcatattatgtattatcgttgattttttgaaattcaacgcgtttggaaacgaatatgcagaatgattttcacaccgaagtgaccgactgcgttgcaaccggaacggtgttaaacttgttgcatcaaaatttgttgagaaaaccgtgattctcggttttgcttttgaatagagcaatcacttctgcacccaaggtatcaggttgaccgaattcttaggaggcggacgctctatccagctgagctacggagacacagttctgcatccttggggcagaaaaccccaaaaatacagtaccatattataataccgcaaccgggctgtaaaatcaagttgaacctgcgggcaaaatggtgtatgctataaaggaatgcaaagcggctgcgtgctgcgcagggaggatgctatggaaaagataaaaaatatccgcaaaaagctgcggcaccagaggtcagtccggcgaagaaagctgggactgagcaccccgacccagatcatctgcgtcagctttattgctgtcatcgcgctgggcacgctgctgctcaccctgcctattgccagcaggcacggacggctggatgtgctcaacgccatgttcacagccaccagcgccacctgcgtcaccggtctggtggtgcgggatacgtggacgcagttcacatggttcgggcaggcagtggtgctgctgcttattcaggtgggcggccttggtcttgttacccttaccagcttttttgcgctggccatgcgccggcgcatgggcttccgggatctgcgcttgctgggcgaaagcgtctcggcagacggctacgatcaggccaaaagcgtgctgaagatcgtggtggggctggcagcgatgtttgaaggcatcggcattctgctgctgatgttcgcctttgtgccgcagttcgggctggagggcgtctggatcagcgtattcaccgccatttcggccttctgcaatgcgggctttgacctgttcggacggttcggggcgtactcctcgctggtgccctatgtcaacaactactatgtgcaggcggtgatcattttcatgatcatctccggcggtctgggctttatggtctgggtggagctgtgccagtggtaccagaaacgccgcctgtccctgcacgccaaggtggtgctgtccttctcggtgatcctgtggctgggcggcgcgctggggctgggactgatggagtggaacaaccccgccacgctgggcgggctgtcggtgcccggcaaggtgatggcttcgctgttccagtcggtatccacccgtaccgccggcatgaacaccgtggacttggcctcctgcggcaccctgagcaagctgcttatgagcgtgctgcaattcattggcgcagcgcccggctctaccggcggcggcgtgaaggtgaccaccttcgcggtcatcatcctgaccatccgcagcgtggcgcaggggcgcgatgactgtgtgatcgctgaccatcatatcgagtccaagaccgtctaccgcgccctgaccattatcgtgctgggcgctgtggcggtcatcggctcggccattgtggtgtattacaacacctcggacgccgtgtccgtggtggatgccatcttcgagtcctgctcggcctttggtacggtgggcctttccgtaggcgtaaccagccagctgaacaacggggcaaagatcctgtatatgctggtcatgttcatgggccgtgtaggcccggtggcctttgccatgagcctgaccgccaaaccggacgacaacaagcgcaagatcatgccagtggggcatatcaacgtaggttaaatgaaaacaggcggctgcacaaagcattgtgcagccgccgcttttatgttgaacgatagggacagaccgttttcacgctgaaagttttttcgcagaaaaagcagatcactctgcgtacagggagataatattcagcacgatctcagtacagcggtccatccgctccacggtggtgcactcgcacacgccgtggaagttgaagccgccggtgcccagattggggcagggcagacccatccagctcagggtagcgccatcggtgccgccgcgcacgggcacctccaccggctccagaccggccatgcgcacagctttgcgggcggtctcgatgaggtggaagtggggcttgatcttttccagcatattgcggtagctgtccttgatctccacttccacggtgcctgcgccgtacttgccgttcaggtaatcagcaatgtcctgcatattgtcctttttgaactgcagcttggcggcatcgtggtcgcgcaggatgtagcccagctttgcggtggtgacatcgccgtacatctggcacaggtggtagaagccctgacgaccctcggtggtctcgggacgtgccatcacgggcagagcgccgtggaactccatggcaacgttggaggcattgatcatggtgtctttggcagagccggggtgcaccgagaagccgtggatggtcacggtggcggcagcagcgttgaagttctcgtactcgatgtcgccggcatcgccgccgtccaccgtgtaggcaaagtctgcaccaaagccggggatatcgaacaggtcggcaccctcgccgatctcctcgtccggggtaaagccgatgcacagcttgccgtgggggcggccctcgcggatgatggtctccacagcggtcatgatctcagccacaccggctttgtcgtctgcacccagcagggtggtgccgtcggtggtgatgagggtctcgcccttcatggaggcaaggaaggggaaggcggagaccttcatcaccttgccggtggcgggcagcaccacgtcgccgccgtcatagttctcgtgcaggatggggttcacgttctcgccactggcatccggggcggtgtccatgtgggcaatcagacccagcgcgggcttttcctcgcagccgggggtggcgggcagggaaccgtagacgtagcagtgctcgtccacacgggcatcctccacgcccagagccttcagttcctccaccagcttgtgagccagatcaaactcccgcgcagcggaaggatgggtgccggactccgggtccgaggtggtgtagaccttgacgtaatcaagcagtcgttcataggcgcgcataacaaagcacactcctttaacaatattgaaggaccgcagctttgcgatccagctcctatcataccctgtttttcctgttttgacaaccttttttgcgcacttgggacagaaagcgcagcttcaacggcaaaatttaccgtaaaaagccgctcgccaac

SEQ ID NO: 13923 - DNA, 1968 bp, Unknown
  gut microbiota DNA sequence
ctggctgtgccccatttttgcagccatcattctggcaagctcggtggcaaacgcctttggctggatcgccatgtaaatgaaagaaaacagattttccggcagcagaacgcaggctttttaacaggacaagggggcccttatgaaaatggaaaccttgaagcagcagatcctgacagcaaagggtgacgtgcgggcagagcttgtgctgaaaaacgcccgggtcatcaacgtgttcacaaacgagatcgagcaggccgatgtagccatccgtcagggggtcatccttggcgtgggacactataccggcgagactgagctggacttgcagggcaagtatgtctgcccggggcttgtggatgggcacatccacattgaaagctccatgctctgtggcccagcctttgaacaggcggtgctgccccacggtacgacggcggtggtcactgacccgcacgagatctccaatgtagccggtacggcggggctggactttatgctggagaccaccaaagatctggcgctttcggtctactttatgctgccctcctgcgtgcctgccaccgggctggacgagtccggcgcggtgctggaagcggagcagctgcgcccctactaccagcagccccgggtactggggctggctgagctgatgaactcctacggcacagtgcgcgcggacaaaaagatcctgcagaagatatgcgactgcaccgctgcgggtaaacgcatcgacgggcacgccccctttctcagcggggaggaactgaacgcttatatcgccgccggggtgcagtccgaccatgagtgctcggacatccatgaagccatggaaaagctgcggcgcgggcaatacatcatggtgcgggagggtaccgcagcccagaacatggaaagcctgctgcctctgttccaggagccctattgcagccgctgtatgctggtgaccgacgataagcaccccggagacctgttgcagggcgggcatatcgactatatcatccgcaaggccattactgccggggtagacccggtggtggcggtgcggatgggcacccttgtcccgtgccagtacttcggtcttgcgcacagcggcgcagtagccccgggctataccgccgatttgatcgtgctgtcggatctggaaaagttcacggtggagcaggtgtacaaaaagggcaaactggtggcgcagcagggcagaatgctgcaccccgccgcccttactgtggacaaggcacgctttgcgcgggtgttcgattccttcaacatggatgagatcaccccggagcaattgcagctgaagcagaccggcacccggcagcgcgtgatctgcctgaccccgcacgccctgctgaccacggaaaaaatcgttccgttctgccagcatccgggcacagcgcccggcgtggatgtggcgcagaaaatcgtcaaactggcggtgttcgagcggcatcaccgctccggccatgtgggcttgggctttttgggtaactacgggctgcaacgcggcgcagtggcttccagcattgcgcacgactcccacaacctcatcgtggcgggcaccaacgatgccgacatggtgctggcgggcaacacggtgcgcaaaaataagggcggccttgcctttgcactgaacggacaggtggtaggggagctgccgctgccggtggcagggcttatgagcaccgagagcgccgaatccgtggaggaaaagctgcaggcgctcaaggcggcactgaaagcccacggcatctcggaggacatcgacgcttttatgacccttgcttttgtaagcctgccggtcatcccgaagctgcggctgaacacctacggtatcgtggatgtggatgcccagcggatcgtcccggcggtgttctgagagcgatgcctgagagggcaaactgtaaatctgacgttttgatcgcaatgccggacagtctgcgggctgtccggcgttgtgtttttacg

SEQ ID NO: 13924 - DNA, 6934 bp, Unknown
  gut microbiota DNA sequence
agatagctcttgactttttgacacagaaccggtatgttgatactgtccgtctgacacacagcattgcatttataatataaggaaactttatggaaaaacgcagtacaccctctttgcagatcaccgaccgctttggcgcgcagacggcctttgccagcctgcgcctgccggacggcaccgaagccaccataccggcagagcacgccgccgccatttatgtcaacgagcagcccgccttccgggtggtatgcaccccggcgctgctgccgcagctggccttggggcggctgctcaccgaaggatggatcgcgtctgcggacgaggtggagcagatcgccgtctgcgccgagggcgcaaaggtgcaggtatatctgcgccacccgctgcctacccgccgcgccgccgcgcaggaggtggccagctgctgcaccgataatatcgcgctgggcagcccggtggaactgcagcccctgcgccctgtgccggggctggccttgcagtcggaatgggtggagcgcctgaccgccgccatgcacgccgggctgccgctgtaccgcgccacccgggcggtgcacagctgctttgtgctgcacaaaggggaaattgtttttgcctgtgaggatctggggcggcacaacgcgctggataaggcggtgggctgcgcggtgctggcagggctgccgctggcagaatgtgtgctgtacaccagcggccgggtgccgctggatatggtgcgcaaggccatccgcgccggggtgccggtgctggtaagcaaaagcatgcccaccgtgcaatccgcagaacttgctgcggaatacggcctgcagctggtgtgcggacgcaaattccctaaagtttaagcaaatattacaaaaacaatagttacaaaacggaaaagcctgtctgtttctgttgacatactccgcgcacgcatgttaatatattatcgaagagaccgctccgctgttgcagcagccagagcggcctcaattgctgtccggggttacccggcaaaataaaaaacaggcaggtgataacatgaagcaggcaaccaacccgtttgcgcccgtaccgctgtggcgcaagcggctgccgggctatgcagccatgggcgttgcgaccatcgccttggcggtcggtctgaccaccttgcaaagcgcacgcaccacggttgccggtaccctgctgccggtgtcggaggcggatgcagccgcctacggcatcagcgcagtgtatcagctcgacgatggcagctaccgcgtggagggctctcagaagggcttccagagcgatgtgcaggctgccgtgaccattgacgccgagggcaatgtttccgcagtagagatcctctctcaggacgaaacggaaagccttggcggccagtgcgtcaacccggagttcacgtcccagtatcagggcgcagctcccttcacgctggcgggcaaaagctacaccgtaacggaccccgttaccggtgccgcctatgccgctgccggtgcggcggaggagcagcccgctgctgccggggattttgaccccgcacagtggcgcaccttcgatacctctcccgaggccgaggctacccgcaagatgtatgctgcggggcttaccttctcggctttgaagggcgaggcactgggcgatgagctggctccgccgctggattccagcgcagaggccgtggcacggcgcaagctgtacgcagccatgctcagcaagagcgcactggacggcgagccgatggcaatcccctttgcggatctctcggcagaggagcagtccaaggcgcgtctggagcaggccagcctgaccaccaccggcaatgcgtccggtgccgtcagcgcagacctgaccgaggtggacgccctttccggcgcgaccatcacctcttcggctgtgacgaccatcgtcaacaactcgtatttctatgtgaccggggtactctgcgcagagtgacctcaacggaggaatggaacctatggcaaaaactgatttcctgacggctgacatgactcgccgtcaattcatgaagatctcgggcaagagccttgcagggctcaccctgtccgcttccatgctgtccctgttcggctgctctcagcagcaggtggattccggcgcagtggccacttgggcactgccgcagggcctgctggtggtcaacgcagacctgtgcaccggctgccagcgctgcgagatcaactgcaccctgaccaacgatggcgtgtgctcctcttacatcagccgcgtcaagatccagcgccgtctgaatctggacggcgcaggcaacggcctgctgtccggcaccgataactgctttgtctacttcccggacacctgccgccagtgtgaggaccccgcctgcggcaatgcctgcccgcagaaggccatcaccaccgacagccgcggcatccgcgtagtggataccgacaagtgcatcggctgcggtgcctgccatgatgcctgcccgtggcatatgcccaccgtcaaccccgagaccggcaagtcctccaagtgcatcgcctgcggtgcctgcgtggcaggctgcccgtccggcgctctgtccatcgtggattgggatgccgttaccagcgcagcacaggctgcatacttggatctgtaaggaggaactacaatggctgaaagttatggctgggcaggcaagatcctgcgcgtcaacctgaccaccggcgagatcaccacgcaggatgacgaaaagtaccataagtatatcggcggtatgggcatggcctaccgcattatgtatgaggaagctcccatggagctggacccctatgacgagaaggctctggtcatctttggtgtcggccccctgaccggcgcaggcgtgccctgctccggccgtatgaacgtgaccttccgctccacctggtctaagggtcactccatcattgacgcacacatgggcggccacatcggctccatgctgaagtatgccggttacgatggcatcgtggtcagcggcatctctgagaagcccgtctacctgcgcattgaggacggcgcggtctctctggaggacgcaaccgagatttggggcaagggcacctttgctgccaataagtggatggtagagcagaacggccgcgagttcgagaccgcttccatcggccctgccggtgagaatctggtggactactccaccctgaacaccagcttcggcaactccggcggcgccggtctgggcgctgccatgggcaacaagaagctgaagggtctggccatccgcggcaccggcagcgtcaaggtggctgaccccaagaaggtgctggagctctccaactacatgatgggcaacctgatcggcggcaacaacaaccacaacgtgcccgcacagccccagagctgggcagagtacagcgccacctccggcaagaaccgctggtccggcgcgcccggccgtatgtggaaaaaggctcccggcggccccgtggataccggcgagcagccctacaacgatatcaacaaggtggctctgcgctgcttcaagggctacttcgattttggcgctcccgctgccgagtacaccgtgaagaacggcggctgctcctcctgccccatccgctgctacaccgagtatgacgtagatccgctggcagattacgatctgcccacccacaactccaacacctgtatgcctgtgctgtacggcacccgcgtctacccggacggcgtgcacgacttcaagtacgagggcgacggcaccatggtcatcaatctggcatggtctcatgctgtggacgacatgggtctgtgggacaactacggcaacctgaaccgcgatctgcagtggatcctgcggatgccgcgcgaggaggccaccaagtacatcagcgaggccgagtacgactctctgccttgggagtgggagaaggccggcgatccccgctgggaggtcgagctgatccgccgcatggcttacggcgagggcgacctgtccgttatcgccaaaggcacgctggccatgatggaaaagttcggcctgcccaagagctggctggaccgcgacgacggcgctaccaactccaacctgatctacaacggcttccccaaccaccacggccctgctgaggcatggcaggttggtatgctgtacaacctcgtctacaaccgtgactgcatgatccacgagatcgtctgcgagaccggttccggtgctccctatgaggtgaccaagaaagtcatggaggacttcttcggcgagggctgctacgataaggccaaggcctacactcccatcaacgagaacaaggcaaagctggctgcctactgcgtcaacgataagaacttccacgactccgctaccctgtgcaactggatgtggcccatgacccagtctccctccaaggagcgcgactaccacggcgatctggatctgcaggcagactttatgactgctgttaccggcgagacctatacccaggccggtctgcaggaggacggcgcccgcatcacccagatgctgcgcgcgatgaccgccatcagcttccagcagaactgcggcagcgcaaacctgcgtcaggagcacgatgccatctgcgattgggtgttcgataaggaccccgacttcaaggcatttgaggaaggcaccaccaagctggaccgtgccgacatggagaaggcaaaggatctgttctacgacgtctttggctgggaccgcaccaccggtgtgcccacccgcgagacgctggagaagtatgatctggctgacatggccgatgatctggaaaagcgcggcatctacgcacagaacaccgcagcagctgaataaatcccatagaaagaggaaagaccgtcatgttgtttggcagacgtaaacccggctacaccaccacggtggatggcagcgtagacccggaacaggccgttctggaactgcaaaaggcagagctggccgccaagaaaaagcccaaggcagaggtgtttgacatcgacgccgcaagcgagactgcccgccgcctgaaggagaccggcagcacctttgacggcagcgccgccaagaccggcgaggatgtgatcgctgcagtggagcgggagaccgccgagcttgccgcaaagcaggccgccgaggccgcacccgaagccgccgaagctgcgcagcccaatgctgcaaagccggaactgctggattttctggccggtgagccggaagcggaaaacgatccctttgcggatcagcccaccaagaccgccccggagctgccggagctgacccctgcacaggagctggccggttacatccgtgcccgctctgcggctgcgctgattaccccccacgctttgctgctggaggaagtggaaaacgccgacgagctgctggcgcagatgcccgcagacccccagtgcaccgatatcgtcacccgcgcgggtgcaaaggatacctactactattccaacgccaacatgagcgataactacgccatgatcgcgcagcttatcgaggacaaggatctgtgtgtgatgttcgccgagatggtgcggttcaacgcccgcatctaccccagcgccactccactcaagtacttccagcgctccccctacggccttgcgccggaggtcatcgagcagacatggaaggctatgcaggagaaccccgcctatgccgatatcgaggagctgaccaacaaccagaacgagcggttcctcttttccaccaagcacctcacccgccgctacgccaaggctatcagcgacgtggacgatttctgcgattaaaccataaactacaattgaatcagggtataagagcttctttgagcaaaggcgtctaaactcccacaaagagcaggacaccgcgccgcaatgctgcacccgcaagggcgggcattcaagggtggcgggggaaaccccaccgccttcccgcagaagaaacgctgcaatttgaaaaaaagaactcctcccatcttcacaggtgctttttggctgtgtgctgccgctgcaagggcggcgcatagccaaaggctgccaccggcgtagcagactgcaaactgccgcagccggttttgtggggatattctgcggaggcgttttgattttccggtcaagacgtctccgcttctttttcacctgccttttttgaaaaaagaatacccccgccggtgtccctgcctgagccatagcagaaggggagagcggcgggtctatggaggaagttacaatgaaccagcctttctgctcccccatcaaggcgctgcgcagcgtgctggacgcggcagcgcttctgccttctccgtccccggagaccatcccgctggaagccgcctgcgggcgcattgctgccgtggacctctgcgcccggatgaaccagcccccctttgaccgcagcccgctggacggctacgccctgcacagcgcagataccgccggagcaagccgggagaccccggtcaccctgccggtggtgatgaagctttacgcgggcgatgctccggctgcggcgctgcccgcagggtgcgctgcccgcatcatgaccggagctcccctgccggagggcgcggactgcgttctgatgcaggaactgaccgacagcggggaagagaccgtgcagctctatgctgccgtaaaaccgctgcaaaacgtcgtgttccggggggaagatgtagcagccggtgcggtcatcgcgcccgccgggacggtgctcacccccgcccatctgggcgtgctggccgggcagggctacgccgaagtagccgtctgccgcccgctgaccgtgggcatcctttccaccggcagcgagctgctggaacccggtgcaccgtgggcacccggtaagatttacgatgccaacggcatccagaacgccgcccggctgcgtcagctgggctttgccgtggaacggcagcagtgctccgacgacccggaggtcatcaccggtaaaatgcaggagctgctgacccgctgcgatgccgtcatc

SEQ ID NO: 13925 - DNA, 373 bp, Unknown
  gut microbiota DNA sequence
tcagcggtgcatgaccacataatcatagccgcgccgcatctggcagacggtgcatgtgtccatgctccggtctgggctgggtacaagcgcgattttgaaagcctttgcatccacaaagtgccgcagacaggtaccgcagagagttcggatggacttgaccatctcaggggtcagctccatctcctcgtagatctcctgctcgcgcaccgtggggttcaactcgtccataaaagtgtcctcctatgtatcaaaagtgaatattcggataaagaataaataagagtacgtaaaaaaacgggaactgccggatgcgtggaacgtacccgacagttcccggatcaatatgattaaaggtctcgcatattcgccctcg

SEQ ID NO: 13926 - DNA, 658 bp, Unknown
  gut microbiota DNA sequence
gtagcctccggccacactttcgcaaacgtatccttagcctgtgaagccagcttcagggcattgaccagaaagagcgtgcgtccgcccactgccttggcatccgttgctgccgtgatggttttgcctacgccggttgcatcatggtacagcagcgcaatggtcttgccgtcctcacgcatcttctgcaggttctcggtggcttcctgctggtagtcccgaagttcaatggtctgccccatctgaaccggcaggtctgcttcaaatgccttgaacatggggctggtgcctaagaaagtaatcagctcgtcctttaccttttccggttgcttttccagctggctgtagatccagcgatatactttccagttgtcatagatcaggctgttctgcttcaggaggtcgtcagcgtatttgttttcggacaccttgctggggttgtggtaggtctcaccgtcaatctcgattgcaattttggattcgggagattccagcgcaaagtcgatatagcgatgccgtccatagatgtccacgcagggatactggacctgcagattttcagtcttttctggaccgaacgcctcacagaacaactgaacaaacagttcttccgcacggctgttgacactggttgctttggatggttccatgagggcctccc

SEQ ID NO: 13927 - DNA, 1583 bp, Unknown
  gut microbiota DNA sequence
cctttttaaaacaacgaaatttaagcccgctttatttcatccgtccacaatttttttcaaaatcgtatggttgcacataaatttccagaaagcttgtagcacaatcacgatttttttctttttattcaaagaaaccaccacggcagttccagccacaggttatccatggcctgttcctccgtctttttagcgcggccttttgtcaggtgaaagtatctcgccgtgccgatcagcggatgttcctcgccatcggtaaagccatagcggtacagcagataggcctgctcccgttgggtcagccgtttcaggctatcgtacagttcccggcgcgattcctgctcttccataatactctgcggctgcatggcataagggtctgctatggcttcgatgcgccgcagttgttcctctcccggcagaacatcgtccagcgaaacgcgctggtagcagataccgtccttgccctccgtctgcatccgctgctcaaaggcggcaaaggcatcccgcaccatgtccatcatggcgttgcggatggcaggagccgcgtaggtcaggaacttcatgccctgcgctgcatcgaacttcggcacggccttccacaaacccagattgcctgcctgtttcaaatcgtccgtgtcaaggttcaggccagcctgtgccagattcatgctgcgaaaaaggtcatttgccaccttgccaataaaggacttgttgttgtcgatcaggctgtccagcgcggcagcatcgcctttctgtgccagcgcacaaagccgttcattcgtctgcttcatgggcgttttcctgctctgcggcagaccgcaagatttccaacagaccgcttcgcagctgtttcagtgcttccggcgtggctccttccatacccgaaacgctgtccaacattgcatccgtcaactgctctgccgtgatcgttgggtgctgcacatcctgccctttggtcaattcggtgaacatcttctctgccactttcttgctcatggcttcctgttcggcgtaatggctcccgataccctttttgatttccttgaccgccgccatgaagtacatttcaatgtcatcaaggtcgccttggtacaccggctttctccgaaggctgatgtcctttgcggctttggctgcttccggggtcttgacctttgtgcgcagcagggtgctcaatgtcgtgagcatggcattctgtgctgcgataccggatgcaaaagtatcatcaaaatactgcgttatgcggtatgtaagctctgcaaagcgggcgttttccaacagcaggttgaccacctctgtattgacacgccctgtgtagaggttctttgcgcttctacggacaggccaagctcggcaatgtcgtagttcttgcggtcagggatgttggtttctcccagcaggaaatccgtggacacgttgaacagccttgcgatcttcagcacctgctcatgggtcagggttccttttgcgccactgataaaacggttgatggtgcttttggagcagccgatttccttggcaagctccggttggctgatattgtgctctttcatcaagtccgcaagacggacgttggacggtgc

SEQ ID NO: 13928 - DNA, 1079 bp, Unknown
  gut microbiota DNA sequence
tgtgtcctccttttttatatcaattccgatttgttggttacaaatgtagtgcatccagcacttcatttacgatgtccagcgatacctgccccggggcacttgcctgcccggggttggcaaaggtcatggcagagccgaaagtctccccggccagacggctcaccgcgcccagcgcccccatgctcatggtaatgaccggtgtttccgggtgatggtctgccatctcagcggtggcggccagcagctccagcacatcgctgcggcaccggggcattacggccagcttgggcaggtcggctccggcctgctgcatctgtaccatgcgggagacgagttctgcccggggcggggttttggcaaaatcgtggctggagcacactaccgccaccccggcagaatgtgcctgctctatcagtgcgggcaggtctgccccggcggtgaagaactcgatgtccagcaggtcggcgcagtcagtgtcgaggatcaggcgcagaaaggcaaggtattccttatgggagagcgcctgctcgccgccctctgccttggtacggaaggtcaccagcagaagcttgtcccgcagggtgacccgcagtttctgtacgcagcgggcaatggcagcgggggactgaaagccttcgaaccagtctgcccgccattccacacaatcggccgacaaggttgaaaactgcgcggccttttccagaatagcagcttcggtgcgctccacaatgggcagaatgaccttggggcggccctccccgatgcggcagccgcggatgttgacacaggacatggtgcttctcctttatataataagtatagctacataatacaggatactggaatgactccataatacgttctgcccgccgccttgtcaagaaaaggaggttattataataggagaaaaacaggagcatttacccccgcgcaaagaaattggaaaaaagatgtcaaaaagtgttgacaagattgccggggtgtggtattatacttgagcgccaagcgctgagacaaaagaatgacttctgaagcctcagcaggaagcccttgaaaagaaccaatagacgctgaaaagt

SEQ ID NO: 13929 - DNA, 301 bp, Unknown
  gut microbiota DNA sequence
taagcagattgacggaacttatcaaagtccgcattgaccctacaccacgctatcgggtgcgggaggtcgaaatagagggcaagtcctgcgttgatctggaagtacaggacggtccggcgtatccatattattatgcctttgacggttcccatacggcctatgtgcggcatggcgaccagtccgaagaagccacttcacgggaactgaacgagctgatcctacaaggtatgaaccagacctttgatgccctgcccagttcttatcgagtgggtgatgtcagttttacactgctggccgcgac

SEQ ID NO: 13930 - DNA, 1564 bp, Unknown
  gut microbiota DNA sequence
cgtgttctccgctttcatatgcttcgatgtccaccccgttaaaaatgacttgtagcttatcttctctacaaattttcttctctaaagctgactgcttttccgcatctgaaatgcagatgatcttctcacaaaatggagctgccattttctcgatggctgtgtacattgctctttttttgtcagagcaccgcatattgaatgcccagccatgtgggttatatacacagtgatttttcaatccgatatccgccacacgagcaatcgcaccggccttactggaatgagcgtaaacaatatcgggattatatttttttatcaacctccgaacttctttaatcgagttcagatcactcaccccgattgccctgttcatttcaatttgttcaaaagagtccactaagccatcataatcttccctattaaaatcttgggaacagaccaagatattttcaaatttttctttatccaaatacttgagaagcattcggatgtagcgatccacgccgccagcagcttgcgccacatgcagtattttgatttttttcttcctcatccctcaaatactccttatctttttccgcaactcgatatatagacttagcgcctactaagtaaacgtgttgtacaactttctttgattccactcctctatcccatcctaaatcttttttgcgcaaacaagcccacggcggattgcccaatggcaatccaccgtaggcttgaactctccttcaatctttatttgctgctcctttttgtgggtcaaaacagagcttccaaaagccacctacatataaccctcaggatttcccgcttcttgcagttgtttaacaaataaaacttttgaaggacaactcaagccgtcaaaaccctttagttatcgtagtttttcttggttgaccctatgcggttgtcaagtaaggaacaaaaatttttgcaaaaaaataagccctacaaggctttcaatcggttctgaaccgatctgagccttgtagggcttacctacactctatatgttcttttcttgattatgattatgtcccatgggcatccattctgttacgcggcggattaactcttctaaatttaaccgcccgctcaggtgtggtttcagggcaatccgcatcaaacgtgattggcattttctttgccgcttccagttctgcgagttcttcttttgtaaatgcaagttcctgtttcagttccatagacatttcactcgtttttaccataataaagccccctttcaaattcggtagccattcgtgccgaaatcaatcttgtcacatctgtttttgtaccgctttcttcaattcttactcgttcagtatatacaacaaatagtatttcattcaccttcccgatgaactggtctatattgccaatcaatgcaccctctgctttttgagaaatccgtccagcagaagtatcgcctatggtgttatatcgatcttcgtcatagctatgatcctcatcatagaactcgattcggtcatagtcaaagaagatacgcgctgcactcttaaatgaaattccgtgttttttaatatttatctgattttta

SEQ ID NO: 13931 - DNA, 1112 bp, Unknown
  gut microbiota DNA sequence
ccccctgtttgccccgggcacactccccctgtgtccggggctttatagaaaggagcacccccccccatgaaacgatacgaccgacggacttttctgaagctctccggcgcatcggcggtgatgctggcgctggcagcctgtgacgatagctgctcctccggctccacaagttccggctctgccacagaaacgcctccctcgccgccgatccctgtgatccgggacgggcagaaaattctgaccattttcaacgcagagctggcccggcgaaaggtggagaacatcaagttcgagtacagcaagggtctggagcacgccattcaggcagatgtgcagatgtttgtggataacggcagcccggagttcccgtcggacgaagggctcaggctgcggatggagggcgactatgccgcaaagatgtgggatggtctgcacgaggcgggttacagctccggctccacagccatcttccgtatgctcaatcagtaccgggtaggcgtggatttcgaccacgaaggaaagcacctttacagcatggattgtctctaccccaccaccgaggcccagttccagcaattggtggatgaactgatcaaggactacggcggtgtgccggggcttcatgaggacaacccggtggtgaataaggtaggcatcactgtggtggatatcaacgataagacctattgggccgcctacatcatcgacaagtggcaaggcataggagacggctgaaccacaccatagaaaaggagcctactatgaaataccaacgctttgcggcccttgtgctggctgccgcgctgctgaccggctgcggcggcacccagagcagccccagcgctgctgccgaccaaagctccgacagcagccgaagcacccccggcgcggtggcgcaggccgtccagacagaccgcatcaccgaccagtacacgctggaaaagaacgtttcgggcgtgtggggggaggaagcggtgcagtgcatttccgtccatgtgcccaagctggaatgcgacagcccggatgccgcctacatcaacgatgagctgaacgccatctatgcggcggatttccgggagttcgagaacagcgaggaggccgggcagccgggc

SEQ ID NO: 13932 - DNA, 1103 bp, Unknown
  gut microbiota DNA sequence
cagtagatttcttcgcccagctggtagatctcgctgggatagatcagcttgctgctgtggatgaccgaaagctggtacggcgggttgataccgatgaaagaattgttgtcgttcaggcgcatcgcatttcctccttgattctccaaatgtacttctcggcttcctctaagatctcagccacctgctgcttccgcttcgggatggtgagcaggctgggattgaaggtgaagctgtattccagccgctggatcatggcatgaactgcggattgcaactcggtgtacagcatcatttcctcgatgcttccggcgttctcaaaggacgatttgatgggcgtataggggtagacaggtggtttgccatccaccacctcaggcggcgcgtaaaccgccgtagagcgccggataggctccatctgctggatgctgcccatggggttcagcgcaaggctgatacgcactgcatcatccaccctgcgcatctcctccggggtcagatgccccagatacttcagtgcccggctcttgtcgatggtgaagatctgctctgcctgcacaacggacggcatattcaaccctgcgttttccaacagacagtgggtcggctggtttactttcttttccgccttgcttgtcaatgtggccacgatcagcgtgggcgagtaaaaattccccacatcgttctggagaacgactgccggacgattcccgctttgctctgaaccagtggcgttgtcgaaacgggtgaagaaaatgtctccacgctggaatttccagttttgaatcaaaagctgccctcctttgtaatatgtacaccgcccgctgcacctccttggcagtgtgcggtgtgtttgttcagcggttcatcacaacgtagtcatgaccgcgccgggtctggcagactgtgcaagtgtccatgctccggtctgcgctgggaacaatggcgattttgaacgccttggattctacaaaactacaaaggcagacaccgcagagcgtgcggatggaccgaatcatctccggggtcagttccatttcctcgtagatcgcttgctctaaggtggtacggtcgttttcgttcataaagcctcctattatgtagga

SEQ ID NO: 13933 - DNA, 5391 bp, Unknown
  gut microbiota DNA sequence
ctgtcgcgcagcgactgaggggcttttaatggagaagcgaaaaaagcgttaaagcgatagcgccgactggcgcagcgctagcttttttgtgcttcgacttcttctttaggattgtcaagggcgagcagcccttggcccgttgcggggtgggtggagtccagaggtagggaggggggagtcggaacacccctccctgcctctggcccagcggagcgtctttgcacgctgctggcaggcagaaagttgccccgcagagcgccacacttttctggttctcttttggtgtcaaaagagaacatctctcggctacatcctcttcccctctcccctgttccacatggaacactttacttttctgcggcggcggtggggatacgcacggtgtactcgatgtagccgtccttctcttcccggtgggcggtggcgggcacgccgttgtcggtcatcagccggatggcgtggtcgatggtgttgacaaagatgcgcacgtcccgcaccatggagatgcggtgcccggccttgggcgggctgttcagcagctgctcgatgtagctgtcggtctggcgggcgttcaggcggcgcttggcgatggtgatgagcgcctcgctgcggcggttctccggcaggcgcagcaccgcgcgggcgtggcgctcggtgaggttgttgtccagcacaaattgccgctggtctgcggtcagctgcaaaagccgcagcttgttggcaaaggtgggctgcgccatgcccagacgtttggcggcttcggcttgggtgcaatcccacagcaccatcacatcccgcagcccctgcgcctgctcaaagggattcaggtcggcgcgctggatgttttccagcagacccagcgcagcggtgcggtcgtcggcgtagctgcacaggatggcggggatggtggtcatctttgccagctgacaggcgcgcagccgccgctcccctgccaccagctcgtagccctctgccgccttgcgcaccgtgaccggctggagcagaccgttctcccggatgctctgcgccagcgccgtcagctcctgctcgtcaaagcttttccgtgcctgaaagggcgacgggtggatctggtcgatgggcagagagagtaatttcccggacggtttcttgcgttcaaacatgatgctgcccctttcctgtgaaataaaccttcggtttttccacatttctccgggaaatcgtggaaaacctgttcagcttcagtgtagcacacaaagaaagaccccgccagaaatttcgttcggcagggtcttacaggttgcgtcaaatcatgcgttatttcagcgggctttttgcaattttaccgccgtttctggggtatgctgtcggagtttgcgaaatctttttgcacaaaatcagcgtgcgggtgtcgccgccgggcaggtgcaaagtgcgggtctcgcggtactcgccgcccagctttttgatggccccccgggcggcggtcagctcctcttccccggatgcacccttcatggcaaggaagttaccgcccaccttcaccagcggcaggcagtattctgccagcatgggcagggctgccacggcgcgggcagaagccagatcaaactgctcccgccacaccttgcgggcggcttcctcggcgcgctccttggcaaactccaccccggtcagccccagctgggcgcaggcgtacttcaaaaaatccacccgcttgccggtgggctccatcagggtcagctccagctccggtttgaaaattttggtcacgatgcccggaaagcctgccccggcacctacgtccaccatgcgcccggcaacctccggctggctggcaaacagcaggctgtcgaggaagtgcttatcctcgatgccctccgggtcggtgatggcggtcaggttgaccttctggttgtagtctacaaggatctgggcaaaggcatccagctgatccagctgggtgccggtgagggtgatgttccatgtggaacacttttcctccaaccgctgtttgtcgatcatagtgttttcctttctgtcaggtggttggggcagcgcaatcgtttattttatcgcaacttcgtattatttttgttgtttccctgccagtgcgatgctcagctgcgccacatcggagggcgaaacgccggggatgcgccccgcctgccccagattgcggggacggatgcgggcaagcttttcccgggcttccagcgtcaggccggtcagggcggcatactcaaaattctccgggatgagggtcttttcgtggcgtgccacctcccggatcatccgatcctgtcgggcgatgtaaccggcgtacttgatctcggtctccagccgctccgccagcatgggggtgatctcctcgccccagccgatgatgcccgccaccagcgggtagctgatctcggggcggcgcagcagctcctcggcaacgccgccctcggcggcgggggcaagaccggcggcttccatggcggcgcgcaggtcggcggtgcgcaggtgtgcctcgtgcaggcggcggcgctcggcttccaaaatctgctgggtgtgctggtactttgcccagcggtcatcctgcacaaggccgtattccctgccgatgggggtcaggcgctggtcggcgttgtcctgccgcagggtcagccggtactcgctgcggctggtcatcatgcggtaggggtccatgacgcccttggtcacaaggtcgtccaccagcgtgcccagatagctggtgtgccggggcagcaccagctgctccttgcccagcgcgttgcgggcggcgttcagacccgccagcagaccctgcgcggcggcttcctcgtagccggaggtgccgttgaactgccctgccccgtacagaccccgcaccaccttgctttccagcgtagcttccagactggtggggtctacacagtcgtactcgatggcgtaggcggggcgcatgatctccagatgctcaaagcctttgatgctgtggtaaaaggcgttctgcacgtcctctggcaggctgctggacgcaccctgcaaatacatttcctcagtgttctcgccgcagggctctacaaacagcgggtgacgatccttgccggagaagcgcaccaccttatcctcaatggaggggcagtagcgcgggccgacgccctcgatcatgccgccgtacagcgggctgcgctggatgttgtccagaatgatcttgtgagtctcggggttcgtgtaggcgatccagcattccaccttgttgtgcatgggtgcatcggtcagaaagctgaagggctgcaattcgctgtccgggtcgccgggctggcattccagcttggaaaaatcaatgctgcggcggtgcacccgggcaggggtgccggtcttgaaccggcgcagcggcagaccggcggctttcaggctgtcggtcagggcgttggcggcgtgcatgccgtccgggccggaggcataccacgcatcgcccacgaatattttgccgccgaggttcgtgccggtggccagcaccacgcacttggcggtgtattcgccgtgcagctgggtgacaacgcccttcacatggccgttttccacttccagcgccaccacctcagcctgatggatggcaagccccggtgtctgttccagcgcgtgcttcatgtattcgttgtagcggcggcggtcggtctgcacccgcagcgcgtgcacggcggggcctttgcccttgttcagcatccggctttgcagataggtggcatctgccgccagacccatcacgccgcccagcgcgtccacctcccgcaccagcgtgcccttggcagtgccgccaatactggggttgcagggcatattgccgatggcgtccaaactcatggtaaagacggccgtttttgcgcccagcacagcagctgcatgggcggcttcgatgcccgcatggccggcgccaatgacgatgacatcatattctcctaagtggttcatatactttcgggtttcctctaatcaatgatttgaatttatttccccacacagaaccgctcgaacacctgttcgatgacggattccgaggcgttttcgccggtcaggtcgcagagcgcgtccagcgcatcatccacgcagaccgagacggcatccagcccaaagccgcctgctgcggcatccagtgcaccggctacggcgtcccgggcgcggagggcagcagaaagctgccgctgcccggacaggctggcggcgtgggggtcgatgctgccggtgcccagcagccgcgccaccgcagcggcgatgaccttgcggctcccctcttcccggcagcagaccggcagcaccatggcaaaatatggggcgataagctctgcatcgaaccgggtgggcttgtcctccttgttcacaagggcaatggcgggacggcccgcgcagcgctgcgccagcgccaagtcctcccggctgggcggctcggagccgtcaaagacggcaaggatcagcccggcctcttccagttttttccagctgcggcggataccctcggcctcgatggcgtcctcggtttcccgcagaccggcggtgtcaaaaaggttcagccggatatctcccagctgcaccgcctgctccaccacgtcgcgggtggtgcccgccaccggggtgacgatggcgcggtcgaagcctgccagcagattgagcaaggtagacttgcccgcgttggggcgccccacgatggcgcagtccacgccctcgcgcagcaccgcaccggcatcgtagctgcggatgagggcgtccagctcctcccgcactgcgcccagcacggtacgcaggtgggcggggtccagctccggcacatcctcctccgggaagtccacccaagcggcaagatgcgcctgcaatgcggtcagctgggctttctgggcgttgatctttttcgccagcgcaccgcccagcgcggcgtttgccagcgctgccccctgccgcccgtctgccgaaatcaggtccatgaccgcttccgcctgcgtcagacccagcttgccgttcagaaaggcgcggcgggtgtactcgccgggagcggcaggctgcgcacccgctgcaaggcaggcttccaccagccgccgggccaccgcgctgccgccgtggcaggaaagctccaccacatcctcgccggtatagctgtggggcgcacggaaaaacagggccacgccctcgtcaaaggcttcttccctgtccacgaaatgcccgaacagcgcggtatagcctttggcctcttccactttttttgccgggtttgccgggtggaacacccgggccgccacctgatagctctccgcaccggagagccgcaccacggcaatgccgcccgccccggggggcgttgcaatggcggcaatggtcgatccctgcatactgcatcctttccgcgcgcccggtacggcagagccgccgcag

SEQ ID NO: 13934 - DNA, 5391 bp, Unknown; identical to SEQ ID NO: 13933
  gut microbiota DNA sequence

SEQ ID NO: 13935 - DNA, 541 bp, Unknown
  gut microbiota DNA sequence
cctcctgtcagagtcattgtatcacaaaatgactacatgtgcaaggcggatgctcttgctggggcgtgcggagccccaaaccctgcagggaacgagtacggcaacctgaaatcaatccgtttcttttagcctttcgaacagtctgcgttcaattttataaattccttgataaggttgttcaagatagtacttccccctgtcctcatacgcaaagatagtaattgttcctgtctcatgccggaagtcaatcctgatataactttccgcttgcgggacatcttgaacgctttccttcttagtcggtttagaactagaaatatcggcgattatttcactcatccaagttttatctgaatgacttactgtgttttcttcaatcgttatatcaataggtgtaatcttatcggcttgaggtagcgtaatgggcgctgctttttttccacacgcagctaaagtcagtatacaggtaagacacaaaaacaaagaaagaaattttttcataagtattgttacctccataacttccaatttactgggctaa

SEQ ID NO: 13936 - DNA, 682 bp, Unknown
  gut microbiota DNA sequence
attggttgttcatccgttcgatttcctgctttatctcctgcaccagcgtttcaggcgcagtcaccttgactttgctgccctgactgagcagccacattttcacgcctgttccaaagacttcggcttcaatagagcaaacgccctctttttcatctacgacttttgccatcgggaacttgtccagcacagcttccaccgatgggccatagtagttgaagctgatgttctgcggttcaccgccgaacatgaactgagtgcggttcttatactcgccctctttgaagcggtctttgtagggaacagaaaacttttctccggtttccttgatggaatgtatcctatcaagccggtaaatggtgggataaggatcgttctttttgtggaaagcctctctggtggagtgatctgtgataacacccatgagatagaaataacactctgaaaacatcaatcccaccggctcaaccatccgttttacgatttgacggtctttcaacttttgatattcgatttccagcaccgactgattgcggatggcctgtgccaccatccacagattgtccgggtcaatggttgcatgagccgggtcgtgatagttgaacagctcattgctgatgaaccattcgacctctgccttttccttctgagtcacacaaaggttcaggatgatttgcagttgctt

SEQ ID NO: 13937 - DNA, 386 bp, Unknown
  gut microbiota DNA sequence
gtgggcagcgtgggcaacggctccaccctgcgcctgatctctgacattgagggcgtgaagtacaccgagggccgtttcctgccgtacttcttccccgacaccttccacgagggcggcgacccggtgcgggaagccaaggagaactgggttacagcccgccgcgctatcctgcgcaagcccatcgaccgcatcggctatggcggctatctgaaactggccttgcagttcccggagttcgtggactatgtggagagcgtctgcaacgagttccgcgaactgtacgagaacatcaagggcaccacaccctactgtgtcaagcgagtggccgtgctgaactgttggggtaaaatgcgggcttggggctgtcacatggtgcatcacgccct

SEQ ID NO: 13938 - DNA, 553 bp, Unknown
  gut microbiota DNA sequence
gacaccgcacacaccggcggcatctggtgggaagacccggagatctcctccgctatccgcaagttcgtctggaacggcggcggctttatcggcgtgggcgagccctccggtcacccgtatcagggccacattctccagcttgccagcgtgctgggcgtggaggaagaaaacggcttcaccctcaactacgacaagtacaactgggaagaacacccggaccatttcattctgcaggacgccgaccaacccgtggactttggcgagggcaaaaagaacatctacgcccttgagggcaccgaggtgctggtgcagcgaaacaaagaagtgcagatggcggcacacgacttcggaaaggggcgtgccgtgtacatcagcggtgtgccttacagttttgccaacagccgcaccctttatcgcgctatcctgtggagtgcccacagcgaggaggaactgcatacatggttcagctccaattataatgtagaagttcacgcctacgtcaagaacggcaagtattgtgtggtgaacaacacgtacgagccgcaggacacca

SEQ ID NO: 13939 - DNA, 1062 bp, Unknown
  gut microbiota DNA sequence
atatattgtgtaatacagagaatttcaattgcgacttcgcactcgattgacttgtaatgcaaaaagcattacaataaatccgaggtgataactatggaaaaatcgatgatgctgaacgtccgggtcagccccagcgtcaaacagcaagccgaagatgtgctgaagcagctgggtatcccgatggcaacggctattgatatgtacctgcgtcaaatcactctgaccggtggcattccgttctcgctgtccctgccgaaggctccggctgcgctgaacgctgacaccatgaccgatgatcagcttcatgcagccttgcaggtgggcatcaaagagattcaaaacggtgatactgttgatgcggaaagcgcattcgcacagttcagggaacagcacagatgaagcagtatgacgtaaaaatttcccatacagccctcagcgacatggagcagatttacagctatattgctgaccgtctgctggagcctgacacggctatggggcagtataatcgtattgcagaagccatccagtcgctggacatcctgccggaacgatgtgcgctggtggaaagtgagccggagcgcacccaagggctgcggcagatgctggtggacaactactcggtgttctacattgtgggcgaggatgccgtgtcggtggctcgtgtgctgtacagtgcatccgaccttgtgcgccgcctgcggagaatgaagtgaaaggggtgttcgcatgaccgccgtgatctatgctcgctattccagcgataaccagcgtgaggaatccatcgaaggccagattcgtgaatgtacggcttatgccgaaaagaacggcatcaccgtggtcaagcactacattgaccgcgccctttctgccaaaaccgacaaccgcccggatttccagcagatgatcaaggacagcgagaaacggttgtttgacattgtgctggtctggaaacttgaccgttttgcccgaaaccgttatgattcggcccactatgagtaccagttggaacgaaatcatgtcaagctggtatctgccacggagcctatctctgacagccct

SEQ ID NO: 13940 - DNA, 15931 bp, Unknown
  gut microbiota DNA sequence
tgccatgaccgccgtaatttacgcccgctattccagcgacaaccagcgcgaagaatccatcgaagggcagatccgggaatgtacggcttatgccgaaaagaacggcattaccgtggtcaagcactacattgaccgtgccctttccgccaaaaccgataaccgcccggacttccagcagatgatcaaggacagcgagaaacggttgtttgacattgtgctggtctggaagcttgaccgctttgcccgaaaccgctatgattcagcgcactatgagtaccagttggaacgaaatcatgtcaagctggtatctgccacggagcctatctctgacagccctgcgggtatcatggtcaagagtatgctcaccggcatggctgaatactactcggcagaactttctgaaaaagttgtgcgcggcatgaccgagaatgttctgaagggcaagtacaacggcggcacgattcccattgggtttaaggtggatgaggagaagttctttcaagtcgacccgctgaaagctccctttgtggtagaagccttccagcggtacaacgatggtgcgaccatgaaggagctgatgaactggctgaacgacagcggtgtgactaccaaccgcaaccagaagttcacctacaacagtgttcagacgctgttgacgaacaaacggtacatcggagaaaaccacttcaaggacattgtgatgcccgacagtatcccggccatcgtggacaaggacttgtttgaagaagtgcagcaaaaaatcaagaagaacagccgcgctcctgcccgtcacaaggccgaggacgattacttgctcaccaccaagctgttctgcggaatgtgcggcgcgatgatgttcggcgagtgcggtacgggtagaaacaagatcgttcatcattattataagtgcgccaccgcgaagcgtttcaagacctgcaagaaaaagaccgtccgtaaagagtggctggaagatttggtcatagctgaaaccatgaagctgattcaagacgatgccgtgattgatgccatcgttgcagaggtcatggagttgcaggaacaggaaaacaccacactccctttgctggaaaagcagatgcgcgaggtggagaacggcattgaaaatatgctgaacgccattcaagctggtgtgctgaccaattccaccaagtcgcgtttggaaaagctggaagcccagcagaaagaacttgaggttcggatcgccgaagaaaaaatcgctcggccacggttaagcgaaaatcaggttcgtttctggctgacccggttccgcaaactcgacccgaacgtgaaaagccaccgggagacgcttatcaacacgttcgtgaacgccgtttatctttatgatgaaaaagttttgattgcattcaactacaaagacggcacaaaaaccatctctttcaatgaaattgccgccaaagatgcctcagagggcaatggttcggatttgggttgcttcgctccaccaagaactccggtatccaatgggtaccggagtttctgttttacctgccttgaaaaaggggctgcaagggtggattcgaacagctgcggcgctgtcgcagaagacagcgcaaaaacagcccagtgggctgtttttagcagcgcggctcgcgcaatccacacgcgcccaccaaggactccagtatccgaaccgggtactggagtttctgttttatctgccttgaaaaggggctgcaagggtggattcgaacagcatcgacccgccgaatagtccggcgggggaaagcccctgtgcaacagcgacgaccgctgccagcggcagaaacagggaggagctgttggggctgcggccagcaggatgcgcgtgccgcccaaggcacgatgcagccgctgggagccgcgacccgggttccttttctgcgcggctcgcgacatctgcccgcacacatattgcatctgtccctgacctgtgataccatacaggtaactgaaacaacacagacggaggactttttctatgatctacgataccctgaacaacctgcccaactatctgggcgtaagcgacaatctggacaccgtgatcgagtacatcatggcgcgggatatcaccaccctgcctgccaggcgcacccgcatcgatggggacaaggcggtggtcaccgtgagcaccgtcacgccccagacctccgacaaggcactgttccagcggcacgacaatcacattacgctggagactgacttggacggcagtgagctgtttgaggtaagccttgcggagctgacgcccaccaagccaaccgatgaagccgccgacaccaccgtaggcactgccggtaccagcattgccggaatgctgtgcgagggacgctttgccttgtatctggcgggggaaccgtataaatccggcctgaaggcgcagggctgcggcaagctgaaaaaagccgtgttcagcattgagctggacccggacgaggaagaaacggaagaataactgaaaggagactttctgtatgggattttttgctgtactggctgcaagtctgtttgccgtatttatttttactgtattcggcggctattcgctgctgctctggtgtcagcagtccctgtggatggtcgttcctcccgcgctggtgctggccgttctggtctggacatttttgaaaatggacgataagatcaccgccctgcaaaagcgggtggacgagctggaagccgcacaaaaaagcacggagaagcttgaaaaataatacagcgccgcccttcgtagagaaacctctctgcaaaggacggcgctgctttttttgtgaacgctttcacgttggcctgccggtggttacagatttaacagaacattcacccggaagatctgctcctcggtctccagatgcagattgccgttatatttgtgcactaccgtctcggcagataccagcccgatgccggtgccctcgtgcttggtggagcgcaggatgccctgctgttttttcagcatgccgtcgtaacggttctccaccacaagccccagcatggcgggactgagcatctgcgccatcacctgcacccggcgctgctccggcggcagcttctggctggcgtgcagggcgttttccagcagattgcccagaatggtgcacaggtcggcctccggcatgggaagctgccgaggcagtgccagcttccactccacaggaacgctctgctgcccggctgcatggtcgtaatatccggccagtgcatccacggcggcattagcgcacaggctgggacggtgctcgctgagctcgctttcatactggtgcagatagcttttcagctcctccagctgcccggtctcggtcagtccggcaatcacatgcagatgctgccggaagtcgtgccgcagacggcgtgtgttgtccagataggtctgtaactccatgtaccggcgggattccatggccagcagctggttttcccggtccagccgggcattgcgggtaaactcccgggcaacgcggtacatctcgtacagcagcagaaagatgccgaacagcgagatggataccgccagcaccgagatgatcttcagccgcccgaccagcaccacggcggggttcagcggcatacagtataccagaaaaacggcatagagggcgggcagcggccacgcagactgccagaaggcttcaccgctgtactcccgcagcagccaccggctccactgcacggcggtgaaccagaacagcacggtgagcatcgcggcaaggcccagccgcagcagcgccgtggaggcaaggcagacggtctgtgggttggagatctcggtctgggcgttgagcagcgtcgacagcagggaacacaccgccatcatcacggcagagatggaaaacagaaacgcggtctggcttacggtcacttccggcgttacccgccagcgcagcagccagaaggagaccagcacgatggcgggcaggagagaattgctgttcagcccgaacacggcgcagagcgcggcgcagccgatgcacagcagggtgatgcatccggcagcgatgcaggcggtgcgcctgggggtgcgcagcttttcccatagggatgccagacacagaaacgcgctgggatacagcagcgcaaaatccagaaaataacggccgaacagggcaagatccatggcggctgctcctttcctcagtgcagctcctgccgcatgtggcggaactggtattgtgtaaagtgggcaagcagagtgcatttatccttctgccgtaccggcaggcgggtgccgtccaggatctcgatgcagtcctccccgaaccgcagcaccttgtccatgttgatgataacgccccggttgcagctcataaagttttccagagcagtaagcttttcttcaatctgcgcaaagctgcacatggcacggtactcaccatcctcggtggtgataaggacgtagtggttccgggcaatggcatacagcaccttgcgcagcggcagctgaatgctttggcgggcaatgcggatctccagttccggctccttacaacgcagcgcccgccgcagctcggcggcaaggtgcacgaatttttcctcctgatagggtttgagcaggtaatcgaaggggtgcaccggaaaggcatcccatacatattccggcgaggaggtcacgaatacgatcagcacctccgggtcggcctgccgcagtcggcgggcggtctcgatgccgttggtgcccgccatgcagatatccagaaacaccacagcgtacaggccgggctctgctgcggcgcggagaaaatcatctccgcaggtaaaccatgtgcactcggctgcaggcagctgctgttgcagcagctcctccagccgccgggcatctgctgcctggtcctctacgatggcgattggcagtgccatccctacaccctctttctccattcattgttcttttattatagcatactgcggcgggaagggcatctgcttttttgcacaaaacgctccattttgcgcgccgagcgccgccctgcgcacccgcagcgggcgactgccaaaaagttttggttgacagacggggcgaatcatgttattcttttgttgattttgagagacgccgccttgcagagtcttttcaaagcaatttactcgggaccgcccaaacggggctaaggccatacggacagccgggtccactgccgaccggcggcgcaagctgccattattgattgagtttgaagctcaaattttataagttggttcctttacaaccatgaaattgcgcagcctatgcgcagacttgtgaaacggtcaataagagtagtaaaagtgtagttgctatatagactctcatcaccccgtctttttggatcgcaaataacgcgcagcaccggcacttacggctgggtgctttgtcagcgcggaaaaagcttttccaagcgcaggtctgcatatttgtgcagtgcctgcgcttttttgttgtgcaaaaagaagaacagggacggaggaaaagatgaacgagaacaaagcgcgttcccggctggaccagcgccgtgcgcccatttacgaggcgctggagcggttccggcagatgcgggtggtgccttttgacgtgcccggccacaagcggggccgcggcaacccggagctgaccgcttttctgggtcagcagtgcgtgggcgtggacgtgaacagtatgaagccgctggataacctttgccatccggtgtcggtcatccgggaagctgaggagcttgccgccgatgcctttggcgcagcacacgcctttttaatggtgggcggcaccaccagcagcgtgcagagcatggtgcttaccgcctgcaagaggggcgatgagatcattctgccccgcaacgtgcaccgcagcgtgctgaacgcgctggtgctgtgcggcgctgtgccggtgtatgtgaacccggaggtggataagcgtctgggtatctcgctgggcatgaagcgggagcaggtggcaaaggccatcaaggagcaccccaacgctgtggctgtgctggtgaataaccccacctactacggcatctgctctgacctgcgtgccatcgtaaaaatggcgcacgatgccggtatgctctgccttgcggatgaagcccacggcacccatttctactttggcggcggcttgccggtatctgccatggcggcgggcgcggatatggcctcggtgtccatgcacaagagcggcggcagcctgacccagtccagcctgctgctcatcggtcccaacgtgcatcagggctatgtgcgtcagatcatcaacctgacccagactacctccggcagctacctgctgatgtccagtctggatatctcccgccgcaatctggcgctgcggggacggcaggtgttccatcaggtggcggatattgccgagtatgcccgcgaggagatcaacgccgtaggcggctactacgcctttggcaaggagctgtgcaacggcgattccgtctttgatttcgacaccaccaagctcagcgtccatacgctggatatcggtctggccggcatcgaggtctacgatatcctgcgcgatgagtacgatattcagatcgagttcggcgatatcggcaacatccttgcctacctgtccatcggcgaccgcccgcaggaggtggagcgtctggtcagtgctctggccgagatcaagcgccgctaccgcaccgacggttctggtctgctgagccaggaatacatcgaccccgtggtggctgccagcccgcaggaggccttctacgcccccaaaaagagcctgcccctgcgggagaccgagggcatggtgtgcagcgagttcgtcatgtgctatcccccgggcatccccatccttgcacccggcgagcgcatcaccaaggagatcttgaactacatcgagtacgccaaggccaagggctgcagcatgactggcccggaggaccccgaaatcttgcacctgaatgttctggcataaggagggaaagagatggaattttggttttcagagtttcacaccccggatgtgaagcacagcattcgtgtaaacaagcagctctactccaagcagagcgattatcagcgcatcgatatctttgagaccccggagttcggccgggtgctcacgctggacggcaacgtgatgctgaccgagcgcgatgagttcatctacgatgaaatgatcgtccatgtgcccatggcggtgcacaaggaggctaaggatattctggtcatcggtgccggagacggcggcgtggtgcgggagctgacccgctacgaccgtgtggagcgcatcgaccttgtggagatggacccgcaggtggtggaggcttgccgcgcctatctgcccggcaatgcctgccgtatggatgaccgccgggtgcatatctactttgagaacgccctgaagtatatccgccgctgcgaggaagagtacgacctcatcatcgtggactcctccgaccctttcggcccctctgagggtctgttcacccgcgagttctacggcagttgcttcaacgccctgaaagaggacggcatcatggtcaaccagcagggcagccccttctacgccgaggacgccagcgccatgcagcgcagccacaagcgcattgcatccaccttccccatcagccgggtgtatcaggcacatatccctacctttgcggcaggctattggctgttcggctttgcaagcaaaaaataccatcccattgatgatctggacgcagaagcgtggaaggcgctgaatatgcgcacccgctactacaccaccaaactgcatatcggagcattctacctgccggcttttctggaggagatgctgcgggaagtggaggaacactgatgcaccccaacgttgagacctttatcggctgcgacagcagctaccgcgccgccagcatcgtgctgtacggtgcgccttacgattccaccaccagctaccgccccggcgcacggttcggcccggcggccatccggcacgagagctacggtctggagacttacagcccttaccagaacgccgacctgaccgattttgatgtgttcgacagcggcgatctggagctgtgcttcggctccagcgagctggcactggccgatatcgaggcccgggcagaggagattttgaaggacggcaaattcccgctgctgctgggcggcgagcatctggtcacgctgggtgccgtgcgggctgcggtgaagaaatacccggatctgcatatcgtccacttcgacgcccacgccgacctgcgggacgactatctgggcgcgaagctcagccacgcctgtgtgctgcgccgctgccacgagttggtaggggatggccgcatccatcagttctgcatccgcagcggcgaccgggcagaattcgagttcgctgcccagcacaccgagatgcacaagtttgattttaccggccttgccgagctgaccgcacagctgtgcgagagcaaggtgccggtgtatctgaccatcgaccttgactgccttgacccctcctgcttcccgggcaccggtaccccggaggctggcggcgtaagctttttgcagctgctggatgccatccgcaccgtgaccaaggctaacatcatcggtgcagacctgaacgagctggcccccacgctggacaccaccggcgtttccaccgccaccgcctgcaaggtgctgcgcgagaccctgatcgcgctggacaagggctggccgggctttcaggtataaatacgaacctaccattttacagataaaggagtaaccgacatgagcaaagttctgatcatcggctgcggcggcgtggcctctgttgccatccataagtgctgccaggtgcccgaggtgttcaccgagatctgcatcgccagccgtaccaaggcaaagtgcgataagctggctgctgagctggctcccaccactactaccaaaatcaccaccgcacaggtggacgcagacaaggtggaggaggtcatcgccctcatcaaggcttaccagcccgacctcgtgatgaacatcgccctgccttatcaggatctgaccatcatggatgcctgccttgcctgcggcgtcaactacatggacaccgccaactacgagcccgagaacaccgacgacccggagtggcgcgctatctacgagaagcgctgcaaggaggccggcttctctgcctactttgattacagctggcagtgggcctacgccaaaaaattcgaggaagccggtctgaccgctctgctgggcagcggcttcgacccgggtgtgacccaggcttactgtgcctacgccaaaaagcacgagttcgataccattgacaccatcgatattctggactgcaacggcggcgaccacggctacgctttcgccaccaacttcaaccccgagatcaatctgcgcgaggtgtctgcccccggcagctactgggagaacggccactgggtggagatccccgctatgagcatcaagcgggagtacaacttcgatcaggtgggcgacaaggatatgtacctgctgcaccacgaggagatcgagtctctggcaaagaacatcccggaggcaaagcgcatccgcttcttcatgacctttggccagagctatctggaccacatgcgctgtctggaggacgtgggtatgctgtccaccacccccgtcaacttcaacggacaggagatcgtgcccatccagttcctcaaggcgctgctgccggaccccgccagccttggcccccgtaccaagggcaagaccaacatcggctgtatctttaccggcaaaaaggacggcaaggacaagacctactacatctacaacgtctgcgaccatcaggagtgctacaaagaagtgggctctcaggccatcagctacaccaccggcgtgccggctatgtgcggcgccctgatgctgcttaccggcaagtggaccaccaagggcgtgcacactgtcgaggagtttgatcccgatccgtatctggatgcactggataagtacggcctgccccgctccgagagccacaacccggctctggtggactgatgcgggtgcgcgacagccgcccgccctttgcggggctggcaaacctgtccgaggagcagctgcaccgcctgcccaccccctgctatctgctggacgaagcccagctgcgccgcaacggcgagatcctgctgggggtgcagcagcgcaccggctgccgcattctgctggcgcagaaggctttttccaacttcaatgtctacccggtgctggcaccctatctggcaggtaccgaggccagcggcctgtacgagagtcgcttgggcagggaagagctgccggagaaggagaaccatgtgttctgcgccgcctaccgggcagatgagtttgaggaattgctgcagtacgccgaccacatcgtgttcaactcgcccagccagctggcaaagttcggcccggcggcaaaggcagcgggtaaaagcatcggtctgcgcatcaacccggagtgctccacgcaggagggtcatgaaatttacgacccctgcgcccccggcagccgtctgggcaccacccgtgctcagtgggacgccgctgtggcagcgcacccggagctgcccgccctgttggacggtctgcacttccataccctgtgcgagcaggacgccgatgcgctggcggtaacgctggccgcagtggagaaaaagtttgccgacctgctgcccagaatgcagtggctcaatttcggcgggggacaccacatcacccgcccgggctatgcccttgctacgctggaaaactgcatcctctcggtgcggcagaagtacggcgtacaggtgtatttggagcccggcgaggcttgggcgctgaatgcaggctatctggtcactaccgtgctggacaccctgcgcaacggggataccagtcttgccattctggatatgtccgcagcctgccacaccccggatgtcatcgagatgccctaccgcccgccgctgttggatgccggtgaggcgggggagaaggcgcacaccgtccggctgggcggccccacctgccttgcgggggatatcatcggggattacagctttgacgccccccttgctgagggtgataagctcatcttcggcgatatggccatctacaccacctgcaagaacaacaccttcaacgggatgcccctgccgcccatctggctgctgggcgcagacggcaattgccgggagctggtgcactttggctatcaggacttcaaaatgcgtctgggtgcacagtaaaataaaaagcgtttgtcacggcctgcgggctgcgacaaacgcttttttcatgaaaggggacgtaaggtgaacggcagataaaacaaaaaagcactacacgtttccgtgtagtgctttcattctggtggagattaccgggatcgaaccggtgacctcttgcatgccatgcaagcgctctcccagctgagctaaacccccagatgtttgtcctcgtgcctgacgacgtgtgtaattataccagccggagggacgcttgtcaacagttttttgaaaattttttgcagcaaaagatccccgcagggcgtgtgcccggcggggatcgggaagcgggaaagcgctctttttgaaaaaactacgctttagcgtgcctgacggtcaaagatctgcggagccacacggcacagcagcacagcggccaccatggtgagcagggtctcgggcagcatatagctgccgttgtaggtcaggctgtaagtccatgcggccagaccatcgttcaggttgccccacaccagcacaccggacaaaaagctgcacataaagcgcaggaaaccggcggcaaaggtgcctacggccacacccacggtgcggttcttgaaggggcgggcgaacaactcggccagacccagtgccataaaggccagcacatagtccagcagcacctcaccgaggaagtagaggaaggtggaagcgggaggcgggtagaagcccatgatcatttgcaggcaggagttcacgaaaccggtgaacagcccccactttgcgccgtggcggaaggacaccagcacaaagggcagcatactcagcagggtaatgctgccgccattgggcatggtgaagaacttgatgttggaaagcaccgtgccaatagcgatcatcagggcgcattccaccagaatgcgggtcttggaataggttttagacatgatggaaaaattcctctctcatagtagtacacaaaaacaaaatgcgcctgctggcagcagacgcatgaaggtttgttgaacgtaccggacggttccgcaaactccctacgccggcattgcccggatcaggtaaagggtactccgcgctatgcggatctcagccttatggcgcccctgtttttatgtccgcccacagtatacgcgccgtgggacaaaaagtcaagcccgcagacataatccgccccggcagcgcgtatgttataccattgcaaagctggaacgcagggaggcgggatatgaaagccgatccggaacagcgcgccgtgcagctgggggagtacattgccgcccacaacgccacggtgcgtgcagcggcggctgcgttcgggtgcagtaagtccaccgtgcacaaggacgttgccgtgcggctgcgcagcatcagcccggcgctgtacgggcaggtgcgcgccgtgctggcccgcaacaaggccgagcgccacctgcggggcggggctgccacccggcgcagatacagccgccgctgaagcccaaaaaagaccgctgcactgcgcagcggtcttttttgctgagagggttttcaggcggctgcctttatcccccggtgtggaactgctgcaacgcgcctttttccagccggcttacctgcgcctgactgatgccgatctcctgcgccacctccatctgggtcttgccgcgcagatatcgcagctccatgatgcgcttttcccggggcgaaagagcggctaccgtatcgcggaactgcaacccgctgatccagctctcctcgctgtccgggtcccgcacctgatcgatcacatacatggcatcgccgccatcggtgtacaccggctcgtcaaggctgagcggctccaccaccgattccagcgcggcggtcacctcgcgccgggcaagccccgctgcggcggcgatctcgtccatggtgggctcgcgccccagctgcttttccagcgtttcccgcgcctgcatggcgcggtaggcggtgtcccgcagggtgcggcttacccgcagggcgttgttgtcccgcagaaaccgccggatctccccgatgatcataggcacgccgtaggtagaaaaccgcaccggctgcgcggggtcaaagttgtcgatggccttgatcagcccgatgcaccccacctgaaacagatcgtccagattttcgccccgctgggcaaaccgctgcactacgctgagcaccagccgcaggttgccctccaccatccgcgcccgggcagctttgtccccggcgtgggcaagggtgagcagctgccgcttttccgcctcggtcagcacaggcagctgccctgtgttcacaccgcatagctccaccttgttgtacatccaaacgcccccggtcttttagctttaccggaagtatggctctgcgcgccgggcgctatgcgtggaaaaaattgagcgcccctccgcaaaagaggggcgcattatagacaaacctgatacacgttcccacacggaatgtcaagcgctgcgcccgctgttactcgctttcaaggcgggctttcagggtgcggataatgcgcttttccagccgggagatgtaactctggctgatgccaagggcatcggcggcttccttctgggtgtgctccacgccgtcggtaaggccgaaacgcagttccatgatctgccgttcccgcgccgagagcgccgctacggcgctgcgcagcaccgcgcgctcggcgtcctgctccagctgctggcttaccgcgttggcatcgctgccaagaatgtccgagagcagcagctcgttgccgtcgccgtccacgttcaagggctcgtcgatgctggcctcctgccggcggttggagcttttgcgcaggtacatcaggatctcgttgccgatgcagcggctggcgtaggtggccagcttgatgctgcgggcaggggtgaaggtgtttaccgccttgatcagcccgatggtgccaatgcttaccaagtcctcagcgggcacaccgctgttttcgtactttttggccagatacaccaccagccgcaggttgtgggtgatcagttcctcgcgggcggcagcgtccccggcagccatgcggtcaagcagggctttttcctgctcgggggtaaggggcggtggcaggcttggcccgcccgccagataatgcaccgcgccgcagtagcgcaaacgcccccacagctgccgccagacttgccgtaaaaactgcaacatggaaatccctcctgtgcatcaattattatatgtattatagggggcttacacccccgcctcctccgctacgtcatcccccaacagcagcgtccatgcgccggtgggggcgtccggggcgcaaaaggccgccagcaggccgggcacgcggcgctgcccacggcacagcgcggcgggcacggcgggcagcaggcaatggccggtaacggcggcgcagggtacaaactgcaccctcagccccggaggcggggcagcgccggcggcaaaccagctgtctaagtaggcgcgcagcggtgcgggcagccggctgcgcaacggcgggtactgcaccagcaccacccgccgcccggcaagggggtcttgcagggtaaagccggtgtcgtggtaggcctgtaccggcactgttgcccccgcaatttgcagcacagcggcaaagcagccccgctgcgggcggccaaacaccgccagcagcccgcgcagcagcccgtacaccccggcgcagcagagcaaaagctgccccgggcgcaccggtaaaagcacgctcaggttgttggcctgtaccccgggcagcaccaccgcgccgcacagcaggccgttcagcgccgcataccatccgcacagccgggcaaagctgcgcaccccggccacgccgtagcacaccgccaccaccccgcagcagctggcgattttatatagtaccgccagcggggcgggccacggcggggccagcaggacaagggtgctgaccgcagccgccgcgctgcccgcgcacagccgcagcccggtgcagctgcgcccgcataaaagccccgcgcccagcagcagcgcggcggctgcggcaaagtttaccagcagcaattcgtccacaaaaacaactgttttcattgcaaagcaccgccttatggttctggtagtctatttttcacaaatttgcgaaaaaacttgtcacaccagaaaaacccgcatgaacagtgcagttttgctacaaaagccgggacgatgtttcacagtttttacacttttttcaaaaaagtacttgaacatttctggaaagtgtggtatattattgccatcctagcaaggattgaaccggaaacaccggttcgaaaatattttttctatttttgaagggagtaattcattatgatgatgcctgcaaatttctctgctgtgtctgagaacgagatgacctacgttatgggcggtagcgttgctgactacctggcacccgctatgggcgctgctcagtggcagaacttccacaagaacctgattaccatcgttggtaacaagtacgttcagggcttcctggacaacaccgttggcgctgtgttcagcggcacctggacccccggcgacggcctgaccggcttcggcggccagttcagcaagatctggaaggacaactacaccgataatgtgaccggtgagtccactggcgctcagaagttcggctacggcgctctgggcgttgtgaacagcatcctgaacgttgctggcaacctggctgctatctacaacctgggcttcggcaccgctaagaacatcgttggcgagggcgtctacaaagcttaagt

SEQ ID NO: 13941 - DNA, 748 bp, Unknown
  gut microbiota DNA sequence
atggatgtgctgcacccgctttccgctggacttatccggggcatccacatagatagccgacaccagttcacggagagcatagggggtgagttcttcaatatggacgtacttgtgcgctttctggacgaacttttcaatattctcaatttgctgttcctgtacttcgatttcctgttggatagagagaccgtcctcttccagctgcttctgctcggcatcgtaactctggctcatcatgtcgaagcgggcatcgctcagctttccactggcgttgtcctcgtagattttcatgaacagccgtttgagatctgcgattcgcttctcatttcgggcaagctgcttcttcaggacagtcagcttttcgctgctttccacccgaagctgttcctccatgaccttgcggaagtagtcttcatggcaaaggatgtagtctgtcacctgctggatatggttcagcacacggccttccagaacctttacccggatgaagtgtcccttgcacctgctcccgttcttcttgtgcagagagcaatcaaagaagtcttgactgaagtccctgttattggacgaaccatattgcatcttggaaccgcagtcagcgcagtagaccataccggagaaaatgctgctcttgcctgtccgggtcatgcggtgacgctggttacgaatctcctgaaccttttcaaacacatcatcgtcaataatgcgctcatgtgtatccgggaagatagcctgattttccacagga

SEQ ID NO: 13942 - DNA, 109 bp, Unknown
  gut microbiota DNA sequence
tcgggtcatacggtgacgctggctgcgaatctcctgaaccttttcaaacacatcatcgtcaataatgcgctcatgtgtatccgggaagatagcctgattttccacagga

SEQ ID NO: 13943 - DNA, 351 bp, Unknown
  gut microbiota DNA sequence
gggtcttttacatagccgtacggaacattaaccgtcagcggtactccacgctctcccttggccttctgaacggcccgaatcttgcggctggtatcgcgggcgtaaaactcgttgaaccagttcttaatgcccgcaaaatcgttgtttacgctgttcgggtcaatggtgtcgtagttgtcgttaatggcaatgtagcgaacgccatactggggaaaggtgaagttggtgtacagacctgtcaaggcagaattgcgccccagtcgggataaatccttcgtgataacgattcctacacgccctgcttcgatctcgaccagcatactctgaaagccgggacggtcatagttcgtg

SEQ ID NO: 13944 - DNA, 208 bp, Unknown
  gut microbiota DNA sequence
ctgctcaccatcccgaagcgtaagcagcaggttgctgaaatcctgaaagaagccgaaacgtacatctggaggatcaaggaggaaatgcgatgcgcctgaaagacaataacaatcccttcatccatgtcaacccgccgtaccagctcatggtcatccacagcagcaagctggtctacccccgcgaactgtaccagcgtggtgtggagcg

SEQ ID NO: 13945 - DNA, 23366 bp, Unknown
  gut microbiota DNA sequence
cttggcatattgcctccttcctgatgtcaagtcgtttcgggaatagtatagaaaaagaaacctcttgaatcaaggatgtcagatcatccatttacgctatccgtgatccactgaagaaaacggtctttgggtacgaccatccgcttgccgatgtggagcgtggggaagccatccgagcggagcaggatgtaggcattggcgcgggagatacccagtgcagcagcgacgtggtcggctgtcagggtgatgggaagctgctcatacgaagtgaactgagagcgcatagaatacctcttttctctgtatattgtattgaatgaacacatgaagcgtatatatagtggttttgatatgtaacaaggggcatctgcggtttgcggatgccccttgtgtatatgggaggtatgcctgtgaatgtcagaatttcatcggcagtgcgtcttttctgcgcttgccgttgtaggcggtgtagatggggaaaacgtactttttccatccgcgcagctttgcggggtcgccctgcccgatgcggtaaatatcgaccgggtggatgctgcgcagcgcacgaaccagccgttcctcgctgaactcgccgtgatacagctccacaaagtgcatcataccacgcaggacagatgcacggaacgaatcaggcttgccgtcccatgctttaacaataagctgcagggcttcgcagtagattttctcgcccatctggttgtacagcttgagagcggtgcccacgcagccgatgcggtaatcggtcagttgctggctgtcataattgaggctcaatcccacccggttggtggctgcgagaaacgccttggagatggcatcgccgcccaccaccttggcacggagcctgatgcccgctgtcagcgacgcagagaagccgttctgctcggcaaagagcagggcttcctgctccacggtcatgcccgtgtacaccttgcagagaatcggcagatccttgccgccgttgcggaggatgcgcccctcgatggtgtgctgcccatccgttacgatgaactgaccgttacggaaactgaccttcggctcgtttgccacatactcgttgaagtgggcggcgatcagttccacacgcttgcgctccacaccacgctggtacagttcgcgggggtagaccagcttgctgctgtggatgaccatgagctggtacggcgggttgacatggatgaagggattgttattgtctttcaggcgcatcgcatttcctccttgatcctccagatgtacgtttcggcttctttcaggatttcagcaacctgctgcttacgcttcgggatggtgagcagacttgggttgaatgtgaagctgtattccagccgctggatcattgcgtgtaccgcagcttccagttcggtgtacagcatcatgtcctcgacactcccagcatcctcaaaggatgatttgatgggtgtgtagggatagaggggcggcttaccgtcaactacctcaggcggcgcgtaagccgccgtagagcggatgatgggtggaagccgctgaatgctccccatcgggttcagggcaaggctggcacggacagcatcatccacccggctcatttcttccggggtgaggtgtccgagatatttcagaaccctgctcttgtctacggtaaaaatctgctctgcctgaacgatggatggtacggagagaaactcgttcaccagcaggcagtgggtcggctgggtatacttttttgccgccttgcttgtcaatgtggccacgatcagcgtgggcgagtaaaaatttcccacatcgttctgaagaacgactgccggacgattcccgctttgctctgaaccgatggcgttgtcgaaacgggtgaagaaaatgtctccacgttggaatttccagttttgaatcaatagctgccctccttttgcaatatgtacaccgcccgctgcacctccttggcagtgggcgatgtgtttgttcagcggttcatcacaacgtagtcatgaccgcgccgggtctggcagacagtgcaagtgtccatgctccggtctgcgctgggaacaatggcgattttgaacgccttggattctacaaaactacaaaggcagacaccgcagagcgtgcggatggaccgaatcatctccggggtcagttccatttcctcgtagatcgcttgctctaaggtggtacggtcgttttcgttcataaagcctcctattatgtaggatgaaaatgtggatatatggaataagtaaaaagaacaggcgtggacgaagaccgaaaacagcattcggccacgcctgatttaataagttaaggtctcgcatattcgccctcggctccctgcgagtggggcataaacatctggcagcggacttgtaccgcttcattggcatttcagccaccccgtctgctttgtgaccgggccgcgaattacggaagtatcattatcggagtaccagatgaaggaactattcagttttcaaggtacatgaggccggacgtttcgcgtagtggctctcgccatctggtgaagtgtcctctcacttggtagccgacgagaaaggtcaattcgtagcattgaaattgaagtttttcaaaaatttagtgattctcttgattttgatactaatagtaggctgcgcgacacctaaaactttagaaatttcagtgacggtgtacccctcataggcatacatggtgacaaggttgaggtctgcgtccgacaaattttcaagagcagacaacagccgttcgttctcaatttcgccaatccatgtgaagcggctcttggtttcgcggtagtgttcggtaacagaaattgcttcctgatacttgttcataaggggcgagtaggattcttcgccctgttcaaaggacggagcggtgatctcctgcgtgtggttctggtaagaacgcgcagcattgaaaacagaccagtcatactcatacattgcctgaatcacttcaatgctcatgccagcgtcctcatactgcttgcgcatgatagcccactgacggtcaaagttcttcttttccaaaccataattaaagcccatgtgtaacctccaaattttcgataaaacgtgaaatgccgaaaatttggaaacactacggatatttcgccatctggggcagccatgaaaagagggcaaacataaaacctgctccttttcggaagcaggccatctgaagctataaaaatagccggacaacagccgaccgaaagattggagagctttcagtcaagctgctgcccggccatttggtgctacgtttcatacatcacccggaggtgacggcccgttgctcggtgcgaacagtccatattcagagtgcgttgcacccgatttttatgaaatcaatgcttacttggcccgaatggaaaggttgagccataacatttcccggcaacgccagcattttatgtagatgaatccagtgcagtcggcggtcattcgatagagctttatattgcacttggggcaaaactgccagtgttccgtaatcgcttccttcttatgatcgagcatgactttccctcccaaatataaagtttgctgctgtatcataggagaaacggtggactgcggcactttggctccaaaagcgcaaaaacgccagcctcccatggcgggaagctggcgcaatataacacatcggcacgataggacaaaatcactggaatgatgatgttataccgttctttccgcaagaacgatacaatactattgaggtgatgatgatgccgaatgcggatgcgattgctttaggaaagcagataaaggctgtccgaaaagcaatgggaatgacacaagatcagctggcactaaaaagccatgtttcggtgaagtatatcgccaatattgaaaacggaaagcaaaatccttcttttgacattttgagtgcaatcctccatgtcctacccctttccttggattcaatcatcaatccaaatctgtcagaattggaaagtgagtgccgagaatgggatgcaatctatcttgcttgtccaccagaaatgcggaaaacactgctggaagcaacaagatcgcttgcaatccatttgacagaattttcggagcagaacaaaaacacctgaaccgccagcgaggacgttacggacctttctggcgttcttttgtctgaatacgcaatattgtatcagactgctccataaaaacaaatgaaaagcaaatgaattacacaataatttagccgaaatcaatctctttgcggattctgcacctctttttcaaccgcgagatcattttccagcgtgtcatacaactcttgcggagtaagacataagacggcatagaaattgataggatcaccctcgttgaaaagccgcacatatcaaaaacaattacctccgcatgatctattgaagctcatcgtcaaagctgctgtcttactctttctcaatgcggctcccgccaaacacatgcgacatttccatgtgcgccagtgcttcgtcaatcagagccacttctacggcagacagcacaatatccgctgcaccggcgttttcctgtaaacggttgagtttccgggtgccggggattggtacgatataaggctttttgcacagcatccacgccagtgagatctgggcaggtggcgcatttttctcggcggcaagacggtgtaacagttccagcagggcgtggttctggtcaatgctgtctggctggaactgcggcatgacgctgcggtagtccgtgcctgcttcaaacttggaagtcttatcgtatttgccggagagaaaaccgtttgccagcggcgagaatgccacataaccaatgtgcagttcttccagaaccgggaacaggctttcgtaccagcgggccatcatggagtaacggttctggatggccgttaccgggcagactgcgtgtgctcggcggatggtctcctcggtggcttccgaaaggccccagtgagtgatcttgccctcccgaatcaggtcagccattacaccggccacttccccaatgggtaccttggggtcaagccgatgctgataatacaggtcaatatggtcagtgcccagccgcttgagggaggcatctaccgatgcacggataacttccgggcgggaatccggcaccagcggcttgttgactgccgtactggtcatgtcaaaatggatgccgaacttggtcgccagaacgattttatctcggtagggcttcagggcagcacccaccagttcctcgttgtcgtggggattatccggtgtgccgtagacttcggcggtgtcaaagaacgtatagcccatacccacggcctgcgccagcagttcggtcatttccttcttgttggcaggtgcgccgtaggcatggctcatgcccatacagcccagacccacagccgaaacggtcaggtcattgcccaaagtacgatattccatgttaagattcctccttatttgcaaaaacactttccagccatgcggcgtaatcgttcacccagccgccatccgagccaaagccgtggggccagctattcagcacgatgcgtccggcggaaatgcccatattccgaatcacatcatactgctgctggaattggcggtagaaggggtcctccgtgccgtaaacgtagaatgttggcggcagatcaccctcggccagccagtccgggtccatgttgcccacgctgagccgcccatagaacgaatagatcatgcccgccgccgaagcgtgagccggaacagcatccagcgcatcgggtacatagctttcatccagagcagtgccgttgacatcttcatcgtagtgcatcagaaattcgcccgcctgaatgccgcctgcggaaaagcccataactgcaatatcgtcagggtcaatgccgtaaacatccgcattctgccgcacaaagcggacagcccgcgctacatccagcgcgccttcctcctgcgtgtagggcgacagacggtaatctacgatgaaggtctggaagcccagctcccgtagagccgctgccgtgggcagagaatcggtatagtttccacggaactgatacgcaccgcctgccatcaacaccacagcacctttcggttgtactccggtgcggacgggaattgccgtcacataggggcggaaatcccagttgtcaaaataaccggtcattgcagcggtgaactgcgttttagccggaacgttgccttcttcccacaggtacaacgcctgaatatggttagggtctgccgaggtgttcagcacggtcgcattgtccactggttccggcatcttttgcagcatggcggtacgggaataatcctcaatttttccagtgccgtagttgtatgctgccgggaaatcattcggcgttgcaacggtgtcggcagaagtgccgatgcgcaggtcgctgcctgccgggaacgagctgctttcggtttcatttcgtttcgtcatagcatcctcgatggcggaaactccgctttccaaattgctgctgggggcttctgcgcggctggtgtcgcaggccgaaagaccgacagcaagtactgccgcgagaagcagtgcagtccattttttcgtcataacagtttcctcacggtttcagatgttttcttcccagaacgctacggcatgatcgagccagccttcggcagaggtgccggtgcccaagccaaaaccgtgggcaaggcccggaaaaacttcgatctcggcaggggtgccctgagagcggatggtttcaatgcgccagcgcatcacgcgttcgtctgcgatgtagtcccggtcacccacacaggcataagtgggcggctcgttgccgtagacttcccccagcccggtgtactgcatgatgacggctcccggctgcggatacgcctgttcaccgaaggatgccgtgccgtagctgcccagccacgccgccatccgtgccccggcagaaccgccccagagggagtagccgctggtgtctacttccagttcctccgcatgggtaaagacaaaggcaatggcccgtgccagatctttgcaggcggtctgtgcgccggggcggtagatgagcgcaaaagcgttgtactccttgcgggaaagttccagtgcatgaggaaagctgtcctgcatggcccccacatacgcaaacgcaccgcctgcgttgcagatggaaaattttgcgccgggattacccttgaagtagaataagccggtgtcagctttgtccgggtcagcggcttgttcgtcctcggtgtaaatatcgtaaaagatggtctgcccgtccgctgcacgctggcgcagggtgttgcagatgtccactgtttcgtccgggtcgatgttgttatagtaggtaagatgcagctgctccagcgtgtcgccgctgtaataagagcgttccactgggaagatcagccgcccataatcaccgaaaaccgggtcattccgtacggtttcgatgggcgtggtgcgggtataagtttgggtggtcgtttgcatggaatcctttctttccggggtggaggaactgggtgcagcacctgcccggcagcctgccagaagcagccctacacccgccagaagttttgtgaattgccgtcggttcaaaatttctctcctatcacttgtgtttggaaacgatccagttcagaatatcggcatcatcaaagacaacatttgcggcagcatggtagacgtgaagcccctgcgcatcgaaaaaggcgttgtccggggtctgcatttgcagcacggtgtcgatttgttcatccgtccagcctgcggcggcgtaagcatcgtgcagaccgttgtaggcatcccgtgctttctgcacaccgtagtattcatcgccctgcgccatgtagatgtagaccgccacgccgttttctgcaatgggcgcaaaaccgccgtcccactgggatgctccatgcagataagctgcatacaggtcaggccgcatggcaactgcccgcgacatggtttcgccgccagccgagtagcctgcggcgtaaatgcgggcggtatctacggcaaagtgattgatgaaatactccgtcagagcgatggcctgccgcgccgaagtgtcgccccagtcggtgagctgggcagacactacgatcatatcctgtccaaggttcgcccagctggtaaaccccgtccagtccagattgctgccggaggaagattccccgaaccacatcatgttatagccgggcatgaccaccatcatggggtacttccgggtggggtcgtaatcctccggcaggtagtagctgtaatggatgagctcctcagtgctgtccaatgtctgctcccggacaagcccagtctggatgtttccggtttccgaagaagcactctccgaaacagccgaatccacttcggacgaggtcgtgatggatgtgctggccgaaaccgaagaaaccgtattgactggcacagaggatgccgccccggtgcaggcggataataaaacggtcaaagcggtggaaaccgcgaaaatcacgctgcgcataaaatcacctcgcaaaaatcaggaaaatgggaaagccgggacgtttccgtcccggctttccctgcaacaaagaaggaggaatatggaacacttcctcaatgatggaagtttgtgaagacagcaggttctttttcgggcaggccgatctgttgcttgcctatctggatactcttcatcaaaaaggccatgttgcggccaagggtgcgcatggtctgcaagccctcggcatctttcttgacctcctcggcagagccgccgtagaccatgttccaatactggctgctggccactggcatcccacacatggtaaaatatttgttcagcacatcgtaggaagctgtgttgccgccgcgccgacaggtcacgaccgaagcacccactttcatggtcttgtcgatgttcagggtactgaagaacaggcggtccataaaggagatcgcgccgcctgccggggaaccaaagtacaccggtgcgccaatgacaaaggcatcggcttcagccaacttgggggctacttcgttgacaatatcatcaaagacgcacttgttggagccggtgctgtggcagcggcggcaggcgatgcagccccggatgtccttgttgcccacatggacgatctcggtttcaatgccctcggcttccagcgtatttgccagttcggtcagggccgtaaaggtgcagccgttgggccgcggactgccgttgatgagcaatgctttcatacaaacattctccttttgatttaccctctatttcaaaaattaccgcaagagaaaattctcctcacacaaaagctctgcttacaggttcaggccatttacccagcttgcaatgtcggcttcactgctgctgtggctgaaccgctggccgtccagccaagtgccggcgtccgctaattctgccagcagcttgccgctctgcccgatgccggaggaaagggacgtgcagaacggaacaacatttttgccggtgaagtcattgacggcaacaaagctgctcatgggccatgcggcaatgccccaccagatggggtagccgatgaacacggtgtcgtaatcgtcccagccgtccacatcggtgctttccaaagccacagcacgaaggccctcgtcgttgtgttcacgggaaacgcggctgtcattgttcgtccagttcagatcatcggaggtataggggtcagacggaacgacttcaaacaggtcagcacccacggtgtcggcgatggtctgcgctacgccctgtgtagtgccggtggcggagaaatacaccaccagtgttttgcccgtagtcgttaccgtgctggtagcttccgaagaagcagccgcgctggatgcggcttcactggaagccacagaagaactgctcacactgctagcggaattgccggagcaggaagccagcagcagggcggcagcagatgcgccagcaacctgcaaaaactggcggcgggaaattttattcttcatacgaaacacgcctctatctatgtaaaatgccgggaatctcagagaaccgctcatgccagtgcgcggctctccagccactgataaatgtgatcagcgatctctttgttgttcagctcttggaacatgaagtgggagttgccggtgatgccgattttcggcagatcgaccacagtgcagtcaccgccatcggcattgtactgggcggcaaaggccagtgcgccgtcccgtacccgccgccagaagctggtggacatgatatcttccgggccgttgtcgatgtaatcgccaaagtagatagcgattggaatacctgcgctcagcagtttcgtgtactgctccgagccgatggcaggggttccgcccggctcaatggcaacaatggcggcaatgttgtcggcgggcacatcccagccgactgcaccgccctgcgagtgggtgacgaaaatggacttgtggccggtcagggtctgcacgtccttcatcacctcgcccagtgcggcggcagcaactgcctgatcgaagtcgccggtgttgggggtcatctggcggaagaactgattctgtgcagcatcgccctccgggaactgggagccttcgtaccgttccggggcaacgcggccaatgcggaagtgggtgtaccatgcctgatcgccgggcttgtagtccttggagttggcagaccaagtatcgaggaaaccgtccgtgctcatctgggcggtactgccagcctcaccacggcggggctggtctaccaagaacgcagagtagccgttgcgcagaaacagatcggcccagccctgacggccgtccggggtggttatccagcccatgcgggactgtccatagccgtgcagataaaccatcggccaaccgttgctgtctgccgggatttgatacagaacattagcgtgatccacatgagcggtgttgcctgcacgggtagtgtccagccagttggtggtggcatcataagtgcctgccaccggtgccgtgaccgtgccgccggaggagaacattccttgcttggcaatcgtcagcgggccgtccgggttcaggttgttctttacccagcggcttaccttgccgtttgtctcgtcaatggaaacaggagccgctgcacccgtcagcgcggaagcggctgcaccacccaccatggtggcggcaagaactttcagaaaacttttgcgcgtgatcttattcatcttcatttaccctttcatctggttcattttccgcaaaaaaactctccgcacccagctacaaactgcttgaaatttacttctgatcttccacgggaggaaacatggtggcgaatgccgccagcttatcctccgtgacctcataataccgtttatccttgttcagcgtggtgatctcctgcatttctgcatcggtcagcgcaaaatcgaacacatcgaagttgtcgtggatgtgggccgggttcttggagccgggaatgaccacattgcctgcctgaatgtgccagcgcagaataatttgcacgttgctcttgccgtactttgctgcaaggcgtgtgaacaacggctcttccagcaggcccttgtcagcgtggcccagcggataccatgcctgaatcaccatgccattctcggcgaggaaggctttcagttctttctgctgggcgtaggggtgaacttcggtctggaggatggtgggcttgacttcgcagatgctcagaatttctttgatctgctcctcgttgaagttggacagaccgatggcacggactttgccctccttgtaagccttttccatcaggcgataaccggcaacgtaatcaccggcaggctggtgaatgagcagcaggtcgatgtagtcggtgtccagacgtgccagcgtcttgtccacagcatcggcatcggtgtagaaggtcggccacagcttggtttcgaggaaaatttcctcccgcagcagaccggacttcttcatagcgcggcccacggctttttcgttgcagtaggcgttggcggtgtcgataagccgtgcaccgtctttcagcgcactcagcacggcagtttcagctttgtccggggtcagcaggaaggtgccgatgccctctgccggcatcttgacgccattgttcagagtaatgaattccataataaatagctccttttgtatttttcgttccttgattacttgcactcgttgaggatgtccagcagttcttcgcggctcagcttcttgcagcagccgccggtcagcacggtggaatcggccacagccttgaggtcggtgtcggcagggacgcccagttctgcaaaggtggtgggcatcccgatctccttgatgaaggccgccagagcctccacgccagcctgtgccagtttcagctcggatttgcccgccgggtcgatgccccagacgttctgtgcaaagcgggcgaaccgtgcggtgttggccgggagcaggtgacggtacagcaccgggtgaatgaccgccagaccagcaccgtggttgcagttggtgtaggcacccagctgatgctcgatcatgtgacactggaagtcggtgaccttgccgattttcaggatgccgttttcggccatagccgaagcccatgtcagctcgctgcgggcctcgtagttgtccttgtcggtcaacaggacgcggatgttgcggatgacgctgcgcatgacggcttcgttgatgtcatcggagaggttgttctcgtccggcttgccgaagtaagtttccatcgcgtggctcagggtgtcgaacgcaccggaaatgacctgcttcatgggaacggacaacgtgtaggtggggtcgaggaaagcaaagtcggcctgtgcaccccacagggcccccttaatcttcttttcctcatgggtgatgactgcgccgttgttcatctcggagccggtaccgaacaccgtgacgatggtgcccagcgggatgaacgcagtgggacgagtatgcttggtgttttccagctcccacaaatcttcgtctaccttggcctgtgcagacaccaccttgcagcagtcggacacggaaccgccgcccacggcaaggatcaaatccacatggttctcacgggccagctttgcaccctcctgcaccttggcgtaggtgggattgggcatgatgccgggaaactccacgatgcgcttaccctcggcgttcagaataccgacgatttcatcatagacaccattgtgcttgatagaaccgccgccgtaggccagcatcacggtatcgccgtagtgctccagcagacagcccagatattccttcacgccacccttgccgaaataaaccttggtcttgttttcaaacagaaaattgttcatagccgttacactcctttatataaaactgggaaatcagacgtttttgcccatctcgtaggcttccttcatggccggggaggacatcacctcgccgggccgatatacgccggtgccgtagatgacccccttttccttggcaccattcaggcaggcggtaaagccccggaaacactccaaggtgcaggccatggcagcacggttatcgtccgcgcaggtcatgatgaaatagaactccttgttcggaatgttcgtccaccgggcaaggctgcggtcgatgatgatcttcatctgtgcatcaatggagtagaagtacaccgggcttgccatcacgataacatctgccgcctgcattgcgtccagaatttcgctcatgtcatcgttcagggcacacttgccgccgtggtcgcggcagtaatagcaggcattgcagggcacaatcttcttgctgcgcacgaagatcttttgcacttcgttgccgctctcctgcgcaccgcgcataaactcactgcacagcaggtcggagttgccgtccttgcggggactgccggacaaaatcaagactttcttcattggtcgttcctcctttgaggtactctctttttctggttccagtatagcgcaagtctgcatttcccggaatctccattttgttcacttgtttgaactcaaaggttcaaacaacccgcttgacaccctgattgtaacacttagagtcagctttaggtcaagtgcatcttttgtaaaaagaaaaagccactgcatgatttctcatgcagcagcttctcgttgcagtggcgtatcagcgatacaattccttgctggctattttagccgcatccagaaaacgctgaacggcaggcgttggattcggggagtgcaggataccataggggatgccgtaatcccaatctactggaatcactttcagcaatgggtggacattggcccagcccggaattgccagcagcacatcgttggtgttttcgcagcggttgaagatgtccatgctgtaaaattcaaaatccacgatatttacttgtggatggtgctgccataaatcatcccgcagttcatctacatagtggctccatccacggtgcatcagcagtagattttcgccgtacaggtctgtgatctgcaagcggtcttttgccgcaagtttatgatggatggaaaccgcgcagtaaaacggcctgcgaaccagttccagaccggcacatttgcgcagatgcagcatcgtttcatcaaagatgccgcctactacatcaatgttcgtgccgaggtccgccagaatttcccgtgcattttccggggtgttttcaaaaggcacaatctggaatttgatgtccgggcagatggtctgcactttcgaccacagttccatgagcagctgggcaggtgtcatgggagaggaaccaatgcggatgacgttggaatcctcctgcattgcgttccgggcacgaatgacagaatcatggcagtattgaatgatgtacttggcatcctgatacatggaacggcctgctttggtcagtgttagtccccggcgagtacgctcgaacagcttgacaccaagggaatcttccaataggttgatctgcttgatgatggctgttggcgtgatgtagctttcctctgccgccttgttgaagctgcctgcatccgccacacggatgaaggtttccagctgatgattgtacatgaaaacacctgcccttcggagatttctataagaataggataacatccgattgtgttaaaatcaagaggtgttccagcgagataagcggtatgcggttgtagcaagcagggcattcgtctatacaaatgctattttgctttgcaaaatgcttgttgggctgtgcccaaaccccatttgttctgcatcgtgccgatgcaggcggcgcgtttgttccaaacacttttataacaaaaaagatagccctagggttcttccatgcgggaagaattctaggctacgatgcaagagtttgtcatttcaacatggacaccggctgcgtggagctgctgctccgggatgggagaaaaatttccatcgactgcaccggggtcgaggatgcactggacgtgaccatggcgcagaggtcggagttagactacctcatctacaatgatccgctgggctacgcgaatttgattctggatagcgagccggaagaatatttgaagaatgcggccgggagccatgggttagaaatctgaatgaatgctggatattactgttttttttaactggtgatgtccagcatttgttatttggtgttgcccgatcaattttaatggaatctttatacttctacaattttctttacgactcttttatctattccatgctaatctttatgcacacggataggtaaaggagcttttatgattcaatatcctcgttacaggcagcaccgtttttcttcttttcaggtcattattgcagggtttgcggcagttgatctggtgggcgcattgcttctgatgctcccgatcgctgcacagcagcggtgcgttacaccgttccatgaggcgctgtttacttccacctctgccctttgtgtgaccggactggtggtacaggataccggcagctactggtcggcattcgggcagagtgtgatccttcttctgatccagatcggaggactgggcgtcattacagtgggtgctgcctttgcgctgctttccgggcgaaagatctccctcaagcagcgcagcacgatgcaggaagctacggctgccccgcagatgggcggcatcgtgcggctgacaggctttattctgcggatcaccgctctgtttgaattggctggtgctgcactgctgctgccgacattttgcgccgattatggtttgcgcgggatctggtatgcactgtttcattccatttcggcgttctgcaatgccggctttgacctgctgggaacagaggatgcaaaatttgtttcgctgacacggtatgcaggaaacccattgcttaccacagtgatcgcggccctgatcgtctttggcggccttggctttctgacatgggaggacatttgtacataccgccttgactttcaccgctatcggatgcagagcaaggtgatccttgtcacaacggcgtttcttctggtactgccgacgctgtacttttattgcttcgagttcacggcaggctctgcccggcagcgcattttattgtcgatgttccaatccgtcacaccccgtactgccggttttaacaccgccgatcttgctgcgatgggcagcacgtcacaggcattgatggtggttctgatgctgttgggcggttcgcccggctccacggcaggcggcatgaaaaccacaacatttgccgttctgctggccaatatgtgggcgaccttccgccgcagagaagatgcggaatttttcgggcggcgcatagatagttctgcggtcaagaatgctgccacgattgcagggatgtatttgacgctgttcttcctcggagcctttgtcattgctacggcagagcagctgccgatgtcggtctgtctgtatgagaccgcttcggctgtggcaacggtaggtctgacattgggcatcacgccgcagttgggcatcctttcgcagggggtgctgattgcactgatgtttttaggacgtgttggcggattgacgttgatctacgcggcatttggcagcagccctgcccactctcgtctgccgcaggagaaaatcgcaatcggataaaggagacaagtatgaaatcgattcttttgattgggcttggccgttttggccgccatattgcgcaggaactgaatgagctgggtcatcaggtcatggcgatcgacagcaatgaggatcgtgtgaacgctgtgctttcctatgtgacgaatgcacagatcggtgacagcaccagcgaatactttctgcgttcccttggcgttggcaattttgatgtgtgtatcgtaaccatcggcggcaattttcagagttcgttggaaacaacatcactgctcaaggagctgggcgcaaagcttgtggtctcgcgtgcagagcgggatgtacaagccaagtttctgctgcgcaacggtgcggatgaagtggtctacccggaaaagcagctggcaaagtgggcagcgatccgatacagctccgaacacattctcgattatatcgagctgcaggacgaccacgccatcatggaagtgactattccgccggaatggatgaatcgcacgatcggcgagatcaatattcgaaaaaagtataacatcaacattcttgcactgaaaaaagacggaaagctcgatatgagcattacgccggatacgcagctgtgccgggatgaaagtatgctggttttggggaaatacgcatcgatccagaagtgtttccggctctaaaatgataggacggatcgtatggatgtcgctttgttattgatggttcttggagtcatgttgagtggtttccgggcagcagatgcgctggatcacatacgacaggagatccttcgacaggaaggaaaaagacgtggctggtggtcgtaaccatcaaattgtgctatactgtgggcaaggcaggtgatctttatgaatcagaacgacccacccactgaacatattctggcgtgtctgtcgtcctctccctccaatgcaaagatcgtgcggacggcagcaacgatggcaaaggcgtttggagggacctttacagctctgtatgtccggacgcctgactcggatcagatgggaaaagaagactgtcggcgcttgcagcagcacattcgtatggcagagcaggcaggtgccgacatttctacgatctacggggatgacattccgcagcagatcgcagagtttgcccgcatctccggcattacaaaaatcgtactggggcgctccagcgtacatcgccgccatttctggagtggaccgtcactgactgaaaaattgacgctgactgcgcctaatctggatatttatatcatcccggatgcttctgcagagaacggctacggctcaggaaaaaagctgttcacccgtccgcttctgccgtctgtccgtgatctgctgatcaccgcaggcatcctgagctgcatcacgctcatcggcttctttttcttgcaactggactttgcgcgctataatattattatgctctatatgctgggggtgctgttcaccgcattgtctaccagcggctacacctgcggtgtgctggggtccgttgccagtgtagcattgtacaatttcttcatgaccgagccatacctgacattccatgcgtatgatcccggttatcaggttacatttgccctgatgctgacctctgcaatcattacctgcgccctgacaacgcggcagaaggatcatgcaaaaatgtctgcgcaggcagcgttccgtacaaaaatactgtttgatacaaatcagcttttacagagagcaaaaagcgaggaagaaatcctctctcagacagcgtcccagttgatgaagctgctgaaccggagcttgatcgtttacccggaacaaaacggagatcttgggtcagaacaggtttttgagattgatggggaagtgccgcgcaacatcttttctgcaccggaagaacgggatgcagcaaactggacgtttgccaacaaaaagcgttccggcgcaggcacggatagctacccggatgcaaagggactttatcttgcgcttcggaccggaggcggcgtgtttggagtgatcgggatcgatctgtccgaaaaaccgctggatgcctttgaaaacagtgtgctgctttccattctgggcgaaggtgcgctggccatcgaaaaccgcagaaacgcgctggaaaaagagcaagctgcattgcaggcaaggaatgaagagctgcgggcaaacctgctgcgcacgatctcccatgacctgcgcaccccgctgacctccatttccggcaatgccagcaatctgctttccaacggagaaacgctggatacagagacccggaacaagatctgcaccgatatttttgacgatgcgcaatggctgatcggtctggtggaaaatctgctttccatcacccgcattgaagatggacggatgaatctgcagatctcaccgcagctgatggatgagatgatcgaagaagcactgcatcatgtcaaccggaaaagctgcgaacacaccatcacaacacagtatggggacgagatcctcctggtcaatgtggatgcacggctgatcatgcaggtcgttgtcaatctggtggataacgccatcaaatacacccccgtgggctcggtcattcagatttcggcttaccggaaagaccatcaggtcgtagtggacgttgcagataacggtcccggcattccggatcgcgcaaaagcacaggtgttcgagatgttttataccgggcagagccgcatcgcagacagccaccgcagccttggactgggcttgcccctctgccgagcgatcctgacggctcacggcggaacattgaccctgcgtgacaacattcccaatggcagtgtcttttcctttgcattgccgcaaagcgaggtgaacattcatgaataagccgtccattctggtcgtagaggatgatgttcctgtacggtgtctgatcacaacgaccctgaaaacccacggctataaatatctgactgcttccaatggggaaacggcgatcatgatgactaccagccacaacccggacatcatgctgctggatcttgggctgcccgatatagacggcatcgaggtcatccgcagcgtccgcacatggtcgaacctgcccatcatcgtcctgagtgcccggagcgaagattctgataagatcgaggcactggacaacggcgcagacgattatctgacaaagccgttttccgtggatgagctgctggcaagactgcgtgtaacgcagcgccgattgaatctgctggcttctgacggcataaatagtccggtttttgtcaatggtcctttgaagatcgacttctcggcaggctgcgtctggctgagcgagaatgaattgcatttgacccccatcgagtacaaactgctgtgtgtgctggcgcataatgtgggcaaagtgctgacgcatacctccctcacgcagaaagtatggggcagtacgcaggaaaatgacattgcttccttgcgagtttacatggcatccctgcgcaaaaaattggaacgatacccggatgcgccgcatctgatccagacccatgttggtgtcggataccggatgctgcgcgcagaaaatgatgaagcatagtaaaaaaacagggtgcgtccccccggacgcaccctgccaaaagccacagacgatagcgataagctgtaaaaagaagcatggacgcccccgaaaaggagagcgtccatgcttcttgctgtatccgaatggaggagattgcgaaatcagtgattgtccgggcagacgatttccagcatctgatcgaaaacctcttccatctgccgcaccagtgtgaactgggtgcgggcgcggtcgaggttgtgatccgggcgagcaatatggaaataatggtcgccctccagatagtcagtcagaaaacggatgccgcattccagcgtcatgagccttgcaccccatgcaaggctctttttttctgccatgctcatggatgccccggcagtggagagataccctttggcgaacacttcgtacagatgcaggtcaaaatggactttgctctggtcaggttcgtcctcagcgcagtcgttggcaccggtgcggatggaatcgccgaagtcgtaggccgaaagtcccggcatcacggtgtcgaggtcaatgacacagatgccttttccggtagcggcatcgatgaggacattgttgattttggtgtcattgtgggtgacgcgcagaggaatttcgccagctgccagctgatccagcaggacatggcagtcctgctccctcgcatggataaattcgatttccgacgtgatattttttgcccggcccagtgcatcggcggcgagggctttttcaaaattggcatagcggttgggcgtgtcgtggaagcgggcgatggtttcgtggagggtggaggccgggtaatcctccagctggttctggaatttgcccagtgtctcggccacggtgcggaagtcggtttcgctgccgacctgctgcaaacagatggtatcttctacaaagtcgtaggcacgccatgcgccgccgtctgcatccagatagcaagtcgaccccgacaaagttgggatgacattcagcgtttcccgtgctgggtcgccgccctcggcaagaattttcgcccgcagatgccgggtcacgccgcagacattctccatcaggcccaccgggttagtaaaggtatctgtgttgatgcgctgcaaaataaagcgtttggaatgatcttcccgccagaccacaaaggtgtcgttgatatgcccctcaccatagtggtgagcatcgcagagcacaggcccgccaaaatcaaaggcatttgcagcagactggagcagagaaagggtaacggatttcatcataaattcctcgttttcgttatacttcatgccgttttgtcggggcggggcgttttccctgccgcgtctgacggcggtattcgttgggggtcatgccctccgccttgcggaagcactgggagaaatagctgggagaggaaaagcccatcagctcgctgatctgcgccagactgtaaccggtgttgcccagcatatgcttgctctcctcaatgcggcggcggttcaggtaagtaatgggggaaattccgtactcccgctggaaggtgtgggccagatagtatttgttcaggtgggcaagctctgccagcaggtccagcgagatatcctcgcggtagttggtgtccagataccgcttgatctcggcgcactcccggttctcggtcggggcagcctcctccagctgcagcgaaatggtggtgcagcgcaccagccagatcagcagtacctccagcaggtcctgacaaacggtctcgcagccgtctaagctgcggtcggcctcggccagcagcatgtgcagcaacgtgaccatccgctcccggttctcccggcaattgaagatggcgtagttcgtatccgccttgctgaacaaaaactccatgctggcaacgcccagcacgatatactccaagggcgaggcgttcaggctaagctcggtatgctccacctgcgggttcacaatgaccatatcgtccggctttaccgggaacagctgcccggcaaggtagaactgtccctcgccgctgaggcagtagaacagctccgtgcaggagtgggtgtgggtggtactgttccaatcgccgccaaaccggctcttgctgatgtacagcagacggaaggattcccgcggggcgggcgcgtggcggatatcaaagcgctgggtactcataaatggctccttttgaggcgaagaacaaaaaacataaaaataaaagcaagatactaaaaatacgagcctaaaaacgatgcgttgcttcgtatgttttttcttattatagaggcaatgaagaaaaaatgcaagccctgattttaggctaatttttatatttttgtttctcaagtcccttcggaatatgtcaaaatggttacaggtttgggattatgctgaaacttttaaaaaatttttagcacttttgctgaaagaaatttctaaaaagcaatatttctaaaaaatgaaacaacaaagaccttgttgcgaaccgtaaaaacctctatattggaaccagaaaaaaccacagccctctcggacgaagcctgtttgccccggctgtgttttgaacggaatttcatgatggaggatacactatgaaacgcatttctcgtcgcaattttctgaaagcggctggcgtgggtgccgctgcactgagcctggctgcctgtggtggtgctgccagctccaccgcgtccagcacggcatcttctgccgctgcttcttccgcagtggctgcggacgtcaccatcaaggttgctgccatcgagaccggctacggctctgagatgtggaagaaggtcgccgaggcctttaccgcacagaccggcatcaaggtggacctgaccaccgacaaaaagctggaggacgtcatcggcccctccatgcagggcggcgactaccccgacgtggtccatctggc

SEQ ID NO: 13946 - DNA, 326 bp, Unknown
  gut microbiota DNA sequence
cttgtgcagagagcaatcaaagaagtcttgactgaagtccctgttattggacgaaccatattgcatcttggaaccgcagtcagcacagtagaccataccggagaaaatgctgctcttgcctgtccgggtcatgcggtgacgctgattacgaatcttctgaaccttttcaaacacatcatcgtcgataatgcgctcatgtgtatccgagaagatagcctgatttttcacaggattcagatgtttctttttatcccagatagagttagtataggtcttgaagttgactgtgcagccagtgtactcccggcgttccagaatcaaactta

SEQ ID NO: 13947 - DNA, 844 bp, Unknown
  gut microbiota DNA sequence
attgactgtgcagccagtgtactcccggcgttccagaatcaaacttactgctcttttatcccagcgataagggtcttccggggcaggtgcgtttgtactccggccatggctcaacttgtaggcggtaggagtcagaactttgtccacccacagttggtttgcaatttgggtcgggccacggccttccatgcacatggagaagatgcgcttcacgaccgcagccgcttccggatcaacaagccaatgtttcgggttctccgggtctttcacatagccgtacggcacattgaccgtcagcggtactccacgctctcccttggccttctgaacagcccgaatcttgcggctggtatcacgggcgtaaaactcgttgaaccagttcttaatgcccgcaaaatcgttgtttacgctgtttgggtcaatggtgtcgtagttgtcgttaatggcaatgtagcgaacgccacactggggaaaagtgaagtttgtgtacagacctgtcaaggcagaattgcgtcccagtcgggacaaatccttcgtgataacgattcctatatgccctgcttcgatctcggtcagcatactctggaagccgggacggtcatagctcgtgccggagtagccatcatccacaaagaataccgggttcgggaagtggttctttttggcgtattccagaaggatggccttctggttctcaatggacaggctttcgccgagccgtgcgtcctcttgcgacagccggcagtaaagtgcagtgatcttattcgttgctccagacattgttgtgtcctccttactctgtggagcaactgtcagtacaggattggttaccgggtcaagtata

SEQ ID NO: 13948 - DNA, 3227 bp, Unknown
  gut microbiota DNA sequence
gccagcgatgctccccagttctccaagcgctgattatatttcagatgcaactttacggctctgcttcggcagagccgttttttgttgccttcttttccggagaacaggggagcacgactgcgcatctccggcggttgccccgcaaggggcgagccggaggcgcttattgatctttgctcaagcatcgcgtgctaaaacaaaaagcatggttttgcgtctattctgcaaactttttgtgaaccctattgacaaagtaggtggacaggagtatatttttagcagtcgagcagatagagtgctaaaaatcaaaacaaactgctccgtaggaggtgcgcaaaaccatggagaagaacatcgatacaattcaatcacggctctgccgccgctgggcgcggagctgttagcaaagaacttatctgtccgctaaaataaaccttccggtatgaatggaggcttgactttatgaataccaatcaatatacccaaaagacccttgaggctttgcaggcagcccagcagctggctgtggagtaccagcacaacgcgctggagcccgcccacctgctgcacgcactggctgcgcaggaaaacggcctgattccccagctgctgcaaaagctgaacgttgaccccggcagctttgccgccgccgtggcggaaaagctgtccgcgctgccccgggtgtccggttccggccgtgaccctgataaggtctatatctcgcaggcaaccgataaggtgctcagcgccgccgcccgcgaagccaaggccatgaaggacgacttcatcagcgtggagcacctgttccttggcctgctggacgagcaggaccagaccaccagcgagctgttccgcgccttcaacctgaaaaaggacgcctttttgcagcagcttaccgccgtgcgcggcaaccagcgggtgaccaccgataacccggaagacacctacaacgcgctgcagaagtacggtcaggatctggtggaacttgcccgcaagcagaagctggaccccgtcattggtcgagatcaggagatccgcaatgtgatccgtatcctgtcccgtaagaccaaaaacaacccctgcctcatcggcgagcccggtgttggtaaaaccgccatcgccgagggtctggcgcagcgcatcgtgcgtggcgatgtgcccgaaaacctgaagaatcgcaccgtgttcagcttggacatgggtgctctggtggccggtgcaaagtaccgcggcgagttcgaggagcgcttgaagagcgtgctgaatgaggtgaagaagagcgagggcaagatcatcctcttcatcgatgagctgcacaccatcgtgggtgccggtaagaccgacggcgccatggacgcaggcaacctgctcaagcccatgctggcacgcggcgagctgcactgcatcggcgcgaccacgctggacgagtaccgccagtatatcgaaaaagaccccgcactggagcgccggttccagccggtacaggtggatgagcctaccgtggaggataccatctccattctgcgcggcctgaaggaacggtatgaagtgttccacggcgtaaagatcaacgatagcgccctgatcgccgctgccaccctttccgaccgctatatcaccgaccgcttcctgccggataaggccatcgaccttgtggatgaagcctgcgccatgatcaagaccgagatggacagtatgcccagcgagatggacgatctggcacaccgtatcactcagctgcagatcgagcaggtgagcctgaaaaaggagactgacgctctgagccagagccgtttgaaggatctggaaaaggagcttgccgaattgcaggataagttccgcagcatgaaggcaaagtgggagaacgagaagaacgccattggcaaggtgcagagcctgcgtgagcagatcgagcagaccaatgccgccattgagaaagcccagcgcgagtacgacctgaacaaggccgccgagctgaagtacggcaagctgcctcagctgcaaaagcagctggccgaagaggaaaaggttgctgccgccaagaaggaggacagcctgctgcgtgaccgcgtgaccgacgaggagatcgcccgcatcgtggcacgctggaccggcatcccggtagagaagctggtggagggcgagcgcgagaagctgctgcatctggacgatgtgctgcaccagcgggtcatcggtcaggatgaggctgtgaccaaggtgagcgaagccattctgcgcagccgcgccggtatcgccaaccccaaccgccccatcggtagcttcctgttcctcggccccaccggcgtgggcaagaccgagctggctaaggcactggcacaggcactgtttgacgacgagcgcaacatggtgcgtatcgatatgaccgaatatatggagaagttcagcgtcagtcgcctgatcggcgcgcctccgggatatgtcggttatgaagagggcggccagctgaccgaggctgtgcgccgcaaaccttacagcgtggtgctgttcgatgaggtggaaaaagctcaccccgatgtgttcaacatcctgttgcaggtgctggacgatggccgcatcacggatagtcagggccgcaccgtggacttcaagaacacggtcatcatcctgacctccaaccttggcagtgatatcatcctgaacgatctggagcagcgccgtgcgcagggctccaacgagctgagcgaggatgcaaagcatcagatcgacctgctgctcaagagcaagttccgtcccgaatttttgaaccgtctggacgagatcgtctactacaagagcctgaccaaggacgaaatgcgcaagatcgtggatctgcaattgcaggatctgcgtaaccgtatggaggagggcaagcacctcaagctggaggtcaccaccgccgccaaggacttcatcattgattctgcctacgacagcgtctatggtgcacgtcccatcaagcgcttcatccagagccgcgtggagaccctgatcgccaaggccatcatcaagggcaattatgccgagggcaacaccctgacggtggattatgacggcagcgcattggttctgcgttaaaatttaccggttttgtacatggagtacaggccaaacgcttgcacccgtgtgcagaatatgttattatagaaaataacattgatgtgcttttcatcgtggaaatggcaacgatggaaagcacatttttgtatacggaaaagcccgcttggcac

SEQ ID NO: 13949 - DNA, 900 bp, Unknown
  gut microbiota DNA sequence
cgctctgggtagcgctggtagtattggtggcattttccgcctttttctccgcatccgagaccgcattttcttccctgaatcagatccgcctgaaaagccgcgccgaggacggcgatacctctgccgcccgggtgctggcaatggctgaaaaatacgataaactgctttccaccatcctgatcggcaacaatatcgtgaacattgccgcagcctccattggcaccatcattttcaccaagatgctgggtgcagagcggggcgctacggtgtccactatggtgctgaccgtggtggtgctgatttttggcgaggtgacccccaagagccttgccaaggagatgccggaaacggtggccaccgcagttgcgccggcgctcagcctgctgatgctggtgtttaccccgctgacatggctgttcagccagtggaagcgctttctggggcactttgtccacagcaccgaggaggacaccatcaccgagggtgagctgatgaccatggtcagcgaagccgagaatgacggcgaactgaccgaccgggaaagcgagctgatccgcagcgccatcgagtttgatgatgtggaagtggaagagatcctgaccccccgcgtggatgtgatcgcggtggaggacgatatgccgctggaagaggtggcacagacctttgcggaatccggctactcccgtctgccggtgtaccacgacaccattgataacatcattggtgtggtacatgaaaaggacttctacatggcacgcctgaaaaaggagaccaagctggaggatctggtcaagcccaccctctacaccacaggctccacccagatctcccagctgctgcgcaccctgcgcgagcagcaccatcacatggctgtggtggtggacgagtacggcggcaccg

SEQ ID NO: 13950 - DNA, 41275 bp, Unknown
  gut microbiota DNA sequence
ggccgcgacggtgaaccagtcgggctttctcaagtgccgcgccacgcgcgtcggcgaggacacgacgctctcgcagatcatccagatggtcagcgacgcggcggccacgaaagcgccgatcgccaagatcgccgacaaggtgtccggcgtgttcgtaccggcggtcatgggcatcgcgctcgtgacgttcgtcgtctggctgctgctcggccgcaccgtgggctacgcgctcgcgcgcggcatctccgtgctcgtcatcagctgcccgtgcgcgctcggcctcgccaccccggtggcgatcatggtcggcagcggcatgggcgcgaaaaacggcatcctcttcaagacggcggcctcccttgaggagaccggccgtatccagatcgtcgcgctcgacaagaccggcaccatcacctccggcgacccgaccgtgacggacctctgccccgccccgggcgtgacggagacggagctgctgcgcctggcctatgcgctcgagcgccggagcgagcacccgctggccaaggcggtgctgcgccgcgcggaggcggacgggctgaccgccgccgaggtcgcggactttcaggccctgccgggcaacgggctcagggccacgctcgacgggcagccgctctgcggcggcaacgcggacttcatccgcacggcggccgacattcccgcgcccatgcaggcgcaggcgcaggcgctggccgaggccggcaagacgccgctgtttttcgcccgcggcggggagctcctcggcatcgtcgccgtggcggacgtgctcaagcccgacagcccgcaggccatccgtgagctgcgcaacatgggcatccgcgtcgtcatgatcacgggcgacaatgcgcgcacggccaaggccatcggcgcgcaggccggcgtggacgaggtggtcgcgggcgtgctgcccgacggcaaggagcgcgagatccgccgcctgagcgcgcgcggtaaggtcgccatggtcggcgacggcatcaacgacgcgccggcgctcacgcgcgcggacatcggcatcgccatcggcgcgggcacggacgtggccatcgacgcggccgacgtcgtgctcgtcaacagccatctgagcgacgtgccggcggccatccggctcagccgcgcgacgctgcgcaacatccacgagaatctgttctgggcgtttttctacaacaccatcggcatccccatcgcggcgggcgtgttcgtcccgctcggcctgacgctcaaccccatgatcggcgcggcagccatgagcctgtcgagcttctgcgtggtcacgaacgccctgcgcctgaatctgttcaagctgcgcgatacgcgccacgatcataaacgtgcaaaccatctcaaagaagtacccgaaatcaaggaggaaactgcaatgaaaaagaccattcaaatcgaaggcatgatgtgcgctcactgcgaggcgaccgtgaaaaaggcgctcgaggcgctgccggaagtcaccgaggcggccgtcagccacacggcgggcaccgccgtcgtgacgctcagcgccccggtggacgacgccgtgctcaagagcacggtcgaggccaaggactataccgtcaccggcatcgcgtaatgcatccaaaaccgcagcaaaggcgtccccgagaggggacgcctttgctgttttctgctcactttttgtgcgcgtcgatcttctgcgtgaacagcccgtgctgcgtgcagtaccacaccagtgtgccgtgcgcgaagtacggcaggcgcgtctgcgcgccccactcggggtagcgccaccgcagcacgaccgtgtcctcattgaccagcgccgcgaacgacaggtagtgctcccggcgcatggggtggtcggacgtgaggtaccactcgccgtcgctcagctctgccgacaggatagtccccgcgcgcgggcgctgtcaagcgggcggcgaaaaatcgcgccggggcgggaaaaattctgaattttgcctgaatttttgcttccggtgtagcttttgcgcgcgcgcgcccttataatgtaagcgcggacgaaaaaccgtcacaaccatccgcatccgacgaaaaatcaccacggaaaaggagttcgtatatgggactgatcaaagctgccgcgggcgctgccggcggcgttctggccgaccagtggaaggaatttttcctctgcgaggccctgccggccaatgtgctggccgttaaaggacagaaaaaaaccacccgccgctcgagcaacacgcacggcgacgagaacatcatcaccaccggctcgcgcatcgccgtcgccgacgggcagtgcatgctcatcgtcgagcagggcaaggtcgtggaggtctgcgccgagccgggcgagtacacgtatgacgcatcgaccgagccgtcgatcttcgccgggaacctcggcgagagcatcgggcaggtgttccgcaacatcggcaagcgcttcaccttcggcggcgaggccccgaaggaccagcgcatctactacttcaacaccaaggagctgaccggcaacaagtacggtacgccgagccccgtgccgtttcgcgtggtggatcagcgcgccggcatcgacatcgacatcggcatccgctgcttcggcgagtacagctaccacatcgcaaacccgctgctgttttacaccaacgtctgcggcaacgtgaccgaggactacacgcgcgacacgctcgacggccagctcaagagcgagctgctcacggcgctgcagccggcgttcgcgcgcatcagcgacatgggcatccgctactcggcgctgcccggccacacgcgggagatcgccgcggcgctcaacgaagagctctcggcccagtggcgcgaccgccggggtctggagatcgtggccttcggcgtctcgtccgtgaaggccgacgaggccgacgagcagatgattaaggacatgcagcgcgacgcggcctacatggacccgacgcgcgcggcggcgatgctctcgcgctcgcagggcgatgcgatgaaggcggccgcgtccaacacggccaccggcccggccatggcgttcatgggcatgggcatggccggccaggtgggcggcgtcaacgcgcaggacctctatgccatgggccggcagcaggcggcccagcagcccgccgccccggtggccgggagctggacgtgcgcctgcggccagacgggcaacaccggcaagttctgcggcaactgcggccggccgcgcccggccgcgccggagggctggacgtgcgtgtgcggcgcggtgaacaagggcaagttctgctccgagtgcggccgcccgaaaccggccggcacaccgaaatacaagtgcgacaaatgcggctgggagccggacgacccgacccacccgccgaaattctgccccgagtgcggcgacccgtttgacgatggggacatccagtcgtaacccccgcccggacgaaaggaggcatgcgccatgccgacccaggtaacgaactatcagtgcccggcctgcaccggcccgctgcactattcggccaagagcggcaagctcgcgtgcgactactgcggctcgtcattcgacgtggccgagatcgaggcgctctatgcccgcaaggaggccgaggccgccgcagccaagcaggcggccgacgcgaaggccgaagcagcgcaggctgccaaggccgaggctgcggaagccgccgcggcctccggcggctgggacacctccgacctcagccgcgactggggtgcggaggcggacggcctgcgcgtctacagctgcccgtcgtgcggcgcggagctcatctgcgaccagagcaccgcggccacggcctgcccttactgcggcaacccggcgatcgtgccggggcagttttcgggcgcgctgcggccggactatatcctcccgtttcgcctgagcaaggacgacgccgtgcaggcgctgcgcgcgcactacaagggcaaacccttcctgccgcgctcgttcacgtccgccaaccacatcgagcagatccagggcgtgtacgtcccgttctggctgtttgacggcggcgcggagggcgcggccagctaccgcgccagcaacacgaacgtgttcgagaccggcgactatgagatcaccgagacgcggcactaccacgtggtgcgcgccgggtcgctcgcgtttgagaagatcccggtcgacgcatcctccaagatgccggacgaccacatggactccatcgagccgtttgactatgcccagctgcgcccgttttccacggcgtacctgccgggttatctggcggataaatacgacgtgaccatcgacgacagccgcgaccgggcggacacgcgctgccgcgagacgctcgcgcaggccctgcgcgacaccgtcaccggctacggcgcgtgcgtgaccgagcgcgaggacatcgcgctgcggcgcggcaaggtgcactacgccctgctgccggtttggatgctgagcacgaagtggcgcgggcaggacttcctcttcgccatgaacgggcagaccggcaagctcgtcggcgacctgccgacggaccgcggccgcttctggggcatgtttgccgccatcgcggccccgctcacggtggcgctgactgcaattttgcagttcctgctgtaaggaggcgacggatatgaaacgcaaactgaccgccctgctgctcgtgctgctgctggccgtgacgctcgcagtaccggcactggccgccggggactgggtcacggacgaggccggcctgctcaccggccaacagatcagccagctctcgcagcgcgccgccgccctcgcgcagagcagcggcgtcggcgtgtacatccgcaccgtggacgactatgccgactacggcttcaccgacgtgaagacggcgtcctacacgctctaccacaacgactcgctcggcgtcggtgacgggcgcgacggtgtgctcctgctgctgagcgtgtcgaaccgcaagtacgccgccttcgtctacggcgataaggcagagctcctcttcccggactctgccctgcagcagctcgaggacggctttctcgacgacttccgcaacgacgactggtacggcggcttctgcgactacatcgacggctgcgccgacctgctcagcggcgagtcctataccggcagcgactctgactatgcctacagccccggccatgacgccgacgtcgaccccggcttctccgcgccgtcgctgctgcgcaatttgggcatcgcgctcgtgatctcgtgcgtcatcgcgctcatcgtctgcctgatcctcaaggcgaagatgcgctccgtgcgccgccagaccgaggcgcgcgcctacgtcacgcccgagggcctgcacctgacgcgacgcgacgatgtctacacccacacgaccacgacgcgccgcaagatcgagcgcgacaacgaccagcactccggtggcggcgggtcgagcttttccggtggcggcggccacggccgcagcggcagcttctgacgcaccaaaacgcaaaaacgctgtcccattttcgggacagcgttttttcatgcctccgtgacggggatgcggatctcggtcacgaatttttccgggtcgctcgtcaggccgtagtcgatcatcgtgatctcgcgcgagaagtccgccgtcgcggttgcgcagaaaggcgcggatctgcccgagcggcatatccagcgcgcgcaggtagcggatggtgttgagcacctcaaactgccgcggcccgtagtagcggtagccggtcgcggggtcggtgtattccggcgtaagcaggccgatggtctcatagtggcgcaggctgctcacgctcaggtgaaacagctgcgccacgtcgccgatggaaaacagctcctgtgtccgcgccatgtcagtcctcctccggcacgagccggccgcgccggcgcagcacgagaaacgcgatcacgcagatgatgaccgacagcagcgagcccgccgccgtggccagacccatgggcagcagcgtcgtgggaaaccacttgctcatcaggtacgcgcccggcacgcgcacgagcaccacggccgtgatgttgtgcagaaacgacagctccgagcggccgatggcgcagaaatacccgctgaagcaaaagtgcagcccggcaaagcagcagtcgagaatgtacccgcgcaggtactgcccgcccgcggcggcgacggccgcgctgtccgtgaacaggcccacgacgggctctgccacgaactggatgacgaccgagatgagcacgccgaagccgaacgcaacggcgatggcgtaccacagcgtctgcagcgcgcggcggggcttgcccgcgccgatgcattgcgcaccgagggccgacaccgtcgagagcatggacgacggcacgaggaacaaaaagctgatgatcttctccacgatgccgacggcggcggcgtccgtgaggccgcggcggttggcaatgacggtgatgaacaaaaacgcgatctggatcagcccgtcctgcagcgcgaccggcacaccgatgcgcaaaatgcgccccatgaccgcccgtcgcgggcgcagatcgccccgcgtgagggcgatgccgtcgcgctcgcggcggatgacgaccagcgacacggccacgctgaccgcctgcgcgagcgtggtgccaagcgcggcgcccgccgggcccatgtgcagcgcgcccatgaacagatagtcgagcgcgatgttcgccgcgcacgcgatggcgatgaaatacatcgggcgcttcgagtcgcccaggccgcggaagatggacgcgatgatgttgtacgccgtgatcagcggcacgccgagaaagcagatgcgcaggtaggcgaccgtgccgggcacggcctcggccggtgtggacatgaccgccgcgatcggccgcgcgagcgccagcagcacccccgtcaccacgacgctcagcgccagaaacagcgtcgtcgtgttgccgatgtagcccgccgcgccccggcggtcgcgcgcgccgacggcctgaccgatcgtgaccgtcgcgcccatggcgaggcccacgatcatgaccgtgagcatgtgcatgacctgactgccgatggacacggccgtcgtgctggccacaccctcgtactggccgatgatgaacaggtcggccatgccgtagagcgtctgcaggaagtacgagagcagatacggcagagaaaagcgcacaatgttgccaaagacgctgccggtcgtgagatttttctccatggcgtttgcccctttgcgtggaataccgtcattgtaaactctacaacggttgtagagtcaaggttttgttttgccccggcacggatttttttcgcgccggggctgcatttttcaaaacgtcaggcgcatctgataccagacgacgccgccgtgggtagagctcgacacgccctcgctcacgaagccgaacttcgcgtagtagtgcacgagccggtccttgcacgtgagcacgaggccgcggcggccctgcgcgcgcgcgtcggcgatggcgcgctcgatgagctgccccgcgcagccgtgccggcggtagtctggcagcgtgttcacgccgaagatcatctgccacgcgccgtgcgcgtcgtgcagcgcggcgtccgcgtagaggtcatccgtaaggtcggtgcggtccgtgaccatgccgtccacgaacgcgatgagcgtaccgccgtcaaacatcagccagaagtggtcgccatagtgcgccagccggtcagcgagttcttcccgtgtcgcggcctccgccgccgggaagcacgctgcctccaccgccgccacggcgtcgagatcggcgagcgtcgccgtgcgaatcatcctagtatccatcgttatgcctccgtttcgtccagcagcagcgccgccagctccgccaccgtgcggcagtagtgcgggcagatgcgctgcatcgtttcgatgatgtgcggcacggtgtgcgtccaccccgccgcgatgaagtccacgcccgcgcggtcagccatgtccttgccgggcttgagatcgtcgatgaccacgagctgctccggccgcaggccgagctcccgctcgatctggtagatgggccacggcgcgggcttgcgccgctcgggatctgaatcccagccgtagatgcgctccggcgtgggcaggtcgtgcgcgcggtagtcgcgcaggatgttttccggcacggagtggctcacgacgcagatatgcccgcccgcggcgtgaaaccgctgcagcaggtcacgcataccggggaacgtgtcgggcacgtgcgtgcgcacataatccagccacgtctggtactggatgtccatctccgcatcggaaaagcccagaatatcgctgcacagcgcgccgaagcccggctcgaacgagtaggaaaaaaagtcgtcgagcgtcatgtgtacgtccggccgcagcttttgcagcgtctgcacgaaggccgggtaattgatggtcgcggtgctgttgacgacggtgtcgtcatggtcgagcaccagacattggtagcgcatgcgcgccgcctcctttgtctcacattgcacagcattttaccacgaacccctgcgaaatgccaccgccgggcgcaaaaacgcccggacgaagttttcccccgtccgggcggatgccgttgtgcacattgccgtcagaagctgccggcggcggtggacgcccccgcgccccagagcagcacgcgcagcacgccgatgagcgcgaggtgcgcgggataatagacgtaaaagagccagcccatgccgcgccatttgccccgcgtgccgtcatagcaccgcagcagcgggatggcgagcgccgtgccgagctgcacgagcgcatataccttatctataaagaagaaatacacgagcgcgtacacggctgaccacaccatgagccagcccatctgctttcggaagtccccgcgcgcctgccccatgaacaagatcgccatcgcggccacgcagctccagtccgacgggaacgtgaccgcgcagatcacaaacgtcagcgcgatcttgacccagtctttcagccgcgcgtcgtcgtggatgacgagcagcaccagcccccacgcgagcgaccacacgacgcccgtctgattgaacggcccggtggacagcggcacaaacgggatgccaaagcagaaatcatacgcaaagtgcgagatgagcgcgagcgcgaacaggcgcgcggcgtactttttcacatcgtgcgtgtagtggtagccctcgacgatgaaaaaccacatgatcggcgccgtcacgcggccgagcacatggcacacgagcacccaccagtcggtggcgtagccgggccagagcgtccacgtgaggtggtcgagcgtcatggcgaggatggcgatgcccttgagcgcgttgccgctcagggccggtctgcgggtctggagcatgggggcacctccggaaaaatggggttatgcctcccgcaccgggaaacacacctcggtcacaaattcgtcagggttttgcgtctcgtgcgggctgacgtggtagatgttgaacatcggccccgcgctctcgtagccgttggccgcgacccacgccgcgacggctgcgatcacgtcgctgatctgcgcgtagctgccgcggtacacgcagccggcatacgtgacgggcggcagcgtccggaacctgacgtgctccgtgtcggggtagcggccgcggacggtcttgctcgcctcgatgagcacgtcgcgctccttatattcctcgtcgaggaacgtcacgctgcaatagcacgggtcgtcgggcacgaggtgcatgtggtcggtctcgcggcacagcacgtcccacaccgtgccctcggcgtcgtagcaggggatggtcatgcgcacgcacgcggcgtaacgctcgggcagtgtcctgatggtcacattgtagttcatgtctgcttcctttctcagccgctcacgggctgtgtccagaagccgcagtttctgcgccgtgtcggcggcgagcgcctccagccgggtgcgctgcgcggccaggcgcgcatcgagcgccgcgcggtcgtcgtacaggcgcagcagctcgcgcgtctcgctcaggccgaagccgagcgcgcgcagcgcggcgatgcgtccggcggtgatgagctgccgctcgctgtagtagcggtagccggtcatggaatcgacctccgacggggcgagcagccccacctcatcatagtggcgcagcatacgaacgctgactctggacagttttgaaaattcaccgattttcagcatggcggtacctccgtgccggtcgtatttttttgagctcacgcacagcataagccctctcaccgtgtcagagtcaagggggtattttctctttttcagcatagcaaatccgcgccgccgcgtcaatgcccgcgggcggcccagcgtgtcaaaaaagcctcgcagagtttgccgcccgcaggcggcaaagcattgcaatcattttctctcgcgacatgtgcgtgagagaaaatacttctctggctgcaagtgtggactttgtgcgcccccggcgtacaaagtctgcgcgcagcagcctgcaggccttttgtcgggaaagccctccgggttttcccgacaagcaaaaccgcccgcggcagccagagctgccgcgggcggaactgtccggaggcgtgttcagttctcgtcggtcccggccgtctcgccgaggcccgcatcgtcctccccgaggatgccgaggttgccgatggcgtggcggcagagcgccgtgtacgtctgctcgctgatgtcatgctccatcttgcaggcgtcctcctcggcggtcttggcgtcgacgccgagctccatgagaaacttcgtgagcgtgtggtgccggtcgagcatgcgcgcggcaatgtccatgccgctcggcgtgagcgtgatgagcccgtcgcggtccatcgtgatgtagccgttttcgcgcaggcgcttggtcgtgtaggtcacgctcggcttcgtcacgccgagctgctccgcgatgtcgatcgagcggatgtaaccgtgtttctgctgcatcatcagcattgcttccagatagtcttccgcagctctcaagatctgcatagcggattccaccaaccttttcgtaaaattgcttctaggttagcacaccttaaccaaaaatgcaagcaatgcaaaaatttttacaaataccccttgacacgcgatgttagatagattaaactttagcaaggttagggaagtttaactcatgttaaacaaatataaccgttcttttttcatccaaggttagcacgctctaaccgttaccagtggagggatatctatgatgccgctgaatctcgccaatgtcggcgaggagacactgattctgaaagtcggcggaaacccggagaccagaaaacacttggaagatctgggtttcgtccccggtgggacggccacggtcgtatcggcgatcggcgggaatctgatcgtgaaggtcaaagaatcccgcgttgccatcagcgatgaaatggcacgcaaaatcatgatttaagggaggaagcacgatgaaaacgctgcgagaagccaagatcggcgaaacggtcaaggtggtgaagctgcatggtgaaggcgccatcaagcgccgcatcatggacatgggcatcacgaagggcaccgaagtgtatgtgcgcaaggtcgcaccgctcggcgatccggtggaagtcacggtccgcggctacgagctgagcctgcgcaaggccgatgccgagatgatcgagatccaggcataatcatccgtaagcaaaatttattacataaggtaggatcccccatcagcagaggagaatatcgcaaaggagcatccgaatggaaaagcaaatcaagattgccttagccggcaacccgaactgcggcaaaacgacgctgttcaatgcgctgaccggctccaatcagtttgtgggcaactggccgggcgtcacggtcgagaaaaaggaaggccgcctgaaaaagcatgacgacgttgtcatcatggaccttcccggcatctactcgctcagcccgtacacgctcgaagaggtcgtcgcccgcaactatctgatcgacgagcgtccggacgccatcctcaacatcgtggacggcacgaacctcgagcgcaacctgtacctgaccacgcagctgaccgaactgggcatcccggtggtcatggccgtgaacatgatggacatcgtgcgcaagagcggcgaccagatcaacatcagccagctgtcgcagcagctcggctgcaaggtcgtggagatctcggccctgaagggtgacggcgtcatggccgcggcagaagccgccatcgaggccgccaagtccaccaagaccgtgccgatgcacacgttctccggcccggtcgagcacgcgatcgcccacatcgaagaggcggccgtgcacaagatgccggaagagcagcagcgctggtacgccatcaagatctttgagcgcgacgacaaggtgctcgccaagctccacatccccgaggatgtgcaccagcacatcgaggcagacatcaaggccgccgaggaagagctcgacgacgatgccgagtccatcatcaccaacgagcgctacgtctacatcgcggaagtcatccgcgcctgctaccgcaagaaatccaaggccacgcagtccacgtccgataagatcgaccgcatcgtcaccaaccgctggctgggcctgccgatcttcgccgtggtcatgttcctggtctactgggtcgccatggtcgccgtcggcgcgcccgcgaccgactgggccaatgacggcgtgttcggcgacggctggcacctgctgggcatcggctcgagcgcttataacgacgccaacgacgaatacaccgccgcgaccgaagcggtcgacgcgttcctgggtctcgacaccgaagccgaagacttcgacgccgacgccaccctcgcggaaatgaaagccttccagcccacctccgacaccgcgaccaccatggtcgaggatgaggagaccctggctgagaatgaaatgaccgcctactacgacaacatccccgatgacgccgacgaggacagcaccgtgagcatgacgtatgtcgatgcggtcgcctacctcgaagccaacggctttgacgcgcccgatccggccgactacggcgtctgggttccgggcattccggtcctgatcggcaacggtctggagaaggcgggctgcgccgactggctgcagggcctgatcctcgacggcattgtcgccggtgtcggcgcggtgctcggcttcgtgccgcagatgctcgtcctgtttttgatgctggccttcctcgaggcctgcggctacatgtcccgtatcgccttcgtgctcgaccgtatcttccgcaagttcggcctgagcggcaagtccttcatcccgatgctcatcggcgtcggctgcggcgtgccgggcgttatggcctcccgtaccattgaaaacgagcgtgatcgccgcatgacgatcatgaccaccacctttatcccctgcggcgcgaaagtgcccttcatcggcatgatcgccggcgctctgttcggcggcagcgcctgggtctccacctccgcgtacttcatcggcatggccgcgatcatcgtctccggcatcatgctcaagaagacgaagatgttcgccggcgatccggctccgttcgtcatggagctgccggcctaccactggccgacgctgggcaacgtcctccgctccatgtgggagcgcggctggtccttcatcaagaaggccggcacgatcatcctgctgtccacgatcctcgtctggttcaccacgtacttcggcacggtcgacggcacgttccgtatgctgtccgaggacgagatcgactactccatcctcgctgccatcggcggcgtcgtcgcctggatcttcaagcccctcggctggggcaactggcaggcggcagtcgcctccatcaccggcctcgttgccaaggagaacatcgtcggcacgctcggcatcctctacggcggcggcgacggcagcgtgtaccagaacatcgcagctgccttcaacggcatcagcggttacagcttcctggtgttcaacctcctgtgcgctccgtgcttcgcggctatcggcgccatcaagcgcgagatgaacagccagaagtggacgtggttcgccatcggctatcagtgcggcttcgcttacctgtgcggcctgatgatctaccagttcggctgcgccttcacgggcaacctgaacgtgatcggcctcatctgcgcgatcctggcgctggccggcatcatctacatgctggtgcgtccctacaaggaagccaccacgctcaaggcctgagcctttccaaaattcgtaaacgcaaaggagtgattttccatgttcagctggattggcgcgaacctctctacgattttgatttcgattgtacttatcgccattgtcaccttcatttccctttccctgatccgccagaagcggcaagggaaatcctcctgcggtggcaactgtgcccattgcggtgcgcagtgccatagctgccaccccaaagggcagtgaatccgatttggacagacagagtcccccaactctgtctgtccatttttatatgcggcgcgcaatatcttaacaaacaattcaggcgattcttcacagaatcgtcatccttttttcgggaaccaatttacaatggtagcgtctcatcctgtaaagcaccgcagcccatggagcgcggggaaaggaaaccaacaccatgaaatttctcaaacgggccctgcccattgtacttgccgtgtgcctgctcgcaagccttggcgccgtgtcggccattgacgccggcgagacgcgcaccgtcatcggcgcagacctcacggacgaccagatcaagaccgtctacaaggccttcggcatcgagcgcggcagcgtcaaggagctgaccgtcacgaacaaggacgagcggcagtatctcagcggcgtcatcagcgacgagcagatcggcacgaagtccatctcctgcatctccatcgaggtgctcgacgccggcaagggcatgaccgtcgacacgtcgcacatcacctactgcacgagccagatgtacatcagcgcgctggccaccgccggcatcacggatgcgaagatcaccgtaaccgcgccgttcgacgtctcgggcacggcggcgctgacgggcgtgtacaaagcatacgaggacatcacgggcacgaagctcgacgagaccgccaaggccgtctcctcgcaggagctggccacgacggcggagctcgcgcaggccatcggcgactatgactcggtcgagatcgtcaatgagctcaagctcatcctcaacgagacgaaggacatgaccgacgccgaactgcgcgccaagatcaaagagattgccgccgagtacgacgtcacactcacggacgaccagatgacccagctcgtaaacctctgccgctcgctcgaaaagctggacacgaacgccctgctctcgaaggtgcacgccgtgcaggatacgctcaaacagctcgccggcgcgaaggacaagatcgcgtccttcaccggcaaggtcaaggacgtcatcaccgccatcggcgatttcttcgaccgcgtgatcgccctcttccgcaagtaaacccggatagaaagaacccgcccgcaggcactgcctgcgggcgggcttttatgcgcatttttcgtcttagccgcgcagcgcccggtccgtgcgcacgagcaccggcacggtcacgataaacgtcaccgcatcggccgccgccatgaaatacagcacgccgtcgagcccgaaccacaccggcagcagcagcacgagccccacgcccagcacgatctcgcgcaagagcgacagcgccgtgctcgtccacgccttgccgagcgcctgcaggtagatcatcgcgcccttgttcacgcacgagagcgcggccgcgccgagaaaccaccggatgcaccgtacggcgaagtccgtgtagtacgcgctctcgtttttcgcgccgaaaagatcggcaaacacgcccgggcagctctcaaacagcgccgtcgccacgagccccacgaccgcctcggccagcagcagccggtgcagcagcgcccgcgcccggtcgcgccgcccggcgccgatgttgtaccccacgacggggatgcacccggccgagagcccgatggcaatggagatgacgatctggaaaaacttcatgacgatgcccacgaccgccgtcgggatctgcgcatactgcgcctggccgaacacggggtcgagcgcgccgtatttgcggcacatattgagcaccgccgccatggaaaacacgatgctgatctgcgacaaaaagctcgtcatgcccagcggcagaaacgcgcgcagcagctcaccccgcagccggaagctgctccgctgcagccgcacggccttcatgtgcagcagatacgccgccgccaacacagccgagaggatctggccgatgaccgttgcaacggccgcgcccatcatgccccacccgcacgggaagatgaagatggggtcgaggatgatgttgcacaccgcgcccgccagcagcgacagcatggcgtagcgcgggctgccgtcggagcgaatgatggggttcatcgcctgcccgaacatgtaaaacgggatgccgagcgcgatccagaagcagtattcgcgcgagagggcgaacgtctcggcgttgaccgtcgcgccgaacgccgtcaggatcggatccatgaaaatgaggtacaccgccatgagcacgacgctgacgatgagcgtgagcacgatagcgttgccgacgctgcggtgcgcctgctcctgctcccccgcgccgaggcggatgctgacataggcgcagcagccgtcgccgatcatggtggcgatggcgagcgcgatgaccgtcagcgggaacacgacgctgttggccgcgttgccgtaagagccgaggtagctcgcgttggcgatgaagagctggtcgacgatgttgtacagcgcgccgacgagcagcgacaggatgcacggcagcgagaatttgcgcatcagcgcaccgaccggctgctcggcgagaaaggaattggactgggattcgttcatgcttgcctccgattttccgcccaaaggcaaaaaaacggcacacgccgcgcgtgtgcctgcaaacctcggaagccgacacacaccacgctcgcataccgtttcgtatccgaatgctgtgcatccgtgtatcgtgccttcaagccagatttgaaattttacaggagatattataccagcccgcgcccgaaaaagcaagcccccgcggtctcgcacgggggcagtgcgtgtcatttctccagcgcggcgagcttctcgcggcggatgcggtcggcgtcccggcggacgaagtacgcggggatgaggatgaacaccgcgctcacggccgcggccaggaacagctcatacggatagaggtagctgccggcgtagctcgggtacttggcgagaatggccgccgtcggctcgagcgcgacggctttgatgatgagcgggtcgatgatgctcgcgagcaccatgggcagcatgatgtagatgaccatcttcacgctctgcgacgcgccggcgcgcccggcgggcgtatagtcgcgcgacgaggcggtgaacagccccgccatggcgaggttgccggccatgatgcacgtgccgccgacgcacagcagcggcatggcgtggccgacgaacttgatgctgtaggcgatcaggccgccgagcacctgcaaaattgccacggggtaataaaacttctccttgccgaagcggtccatgaccttgcccgcgagcacggacagcacggccgaggcaagcacgacgatgccgatgggcaggatgtagttgtcgatgccgagcgtgacctcgacgagcgagatcatgtacggctgccacagctgcatggcaaggccggagaacatcatgccgagaaagcagatatagatcatcttattggcgcggatgttcgccgggcggaaggcgtagagcacgtcgcgcaggtacgtgtcgccctgcacggggcgcagggccggactgtcgcggaagatacacaggccgagcacgccggccgcgctcgtcaggccgccgagcacgaggaaaaagcccgtccagttgccgtgcacggtcatgccgtcaaagcccgcaaagatgacgatgagcgcgaggatgggcatgatgctcagcacgatgtccacgacgccgcggttcgtgacgtcggtcacgtccgtgacccaggcggaaaaggccgagtcgttggccgtgctgccgatggcggacatgatgcagtccataacgacgaagagcgtcaccgcgagaccgacgtcgccgccgacctgcccgttgccgaagagcgcgaacgccgccgtcgtgatgccccagaggatatacccccagcagacgaaggcgcggcgcttgcccacgcggtccgaccacgcggcgctgaagatcgtcgccagcgcggcggcgatggcgctggccgcgacggtcgcggacgtggcccagccggcggccgtgatgtttttctgaatgtaggtggaaaagtagacgttctcgaccatccaggcgatctgcccgatgaagccgaacaccagcagactcgtccagacgcgcgcgccgagcggcgtcgcctttttgacgaccagattctcctgcatgaaagttctcccctttgcaaggcgttgtcacccgattataccatgttctccccccgcccggcaaccgggaaaccggcttcctgccgcacggcgatccgcgtcaaaaaattttcaaaaatattttttcgtttttgcattaaaaaaagaagttggcgcattattatagcagaacggaaatgaaacatgttttcgtgagacagagcttgctttcctcataaggttgtttaccggttatttacaactttaccccacacacacaaaacttttgcttgctctgcagcgcccgcgcggtatcgcgcgggcgcgttctcttttaaacgccgtgttctctttcgaaagaaataacaccgcccgggactgctttcgccccgggcgtttttccgttttccccttttggcggcgatctgccgtgcgtttggaaagcctttccctttgcggggaaggcttggggtgcgccccgatcacgcagtctctcgcaaagcatctgagccgcaggggagcccgagggggcaaggcccgcctcggatgtgatcctgcatcgccgttcggcgatgccctcacccctgctgcgccagccgcgggatgtcccccacgccgtcgagcacgacgctcggccggtaggcaaactcgtccaatgttgcgcgcgtggacacgccgctgagcacgagcacggtggccatgccgctctccatgccggagatgacgtcggtgtccatgcggtcgccgatcatggcggcctcgcccgagtggcagccgagcatgcgcaggccggtgcgcatcatgagcgggttcggcttgccgcagaaatacgcctgcttgccggtggcgatctcgaccggggcgatcagcgcgcggcacgcgggggcgatgccctcgtccgtcgggccgcaggtgtcggagttcgcgccgatgagcttcgcgcccgcgagcacgagattcgtcgccttcgtgagcgtgtcgagcgagtaggcccgcgcctcgccgatgacgacgtaatcggggttgacgtcgttcatggtgatgccgcggtcatacagcgcattgagcagccccgcctcgccgagggcgtacaccgagcagccgggcgcctggtcggccagaaaggccgccgtggccagcgcgctggtgtaaaaatgctcctccggcacgtcgagccccatacgccagagcttctggtgcagctcgcgcggggtcatgccgctgttattggtcaaaaacaggtatttcttgtgcgtgtcctgcagccagtggatgaactccgccgcgccgggcaggatgtggttgccgtggtagatgacgccgtccatgtcgcacaggaagccttttttcgcgttgaaatcgatcatttccatgtccagtctccttattcttgcttctgctctaagcttaccacgcatcctgccgccgggcaagcggcgggcgcgtcaaatttgcgtaaagtcacaggtccagccgcaggaagatcgtcgtgtccagcgggctgtcgttgtacggcgggatgtcgtaaaacccgagcgcgcggtacattttgatcgcgctcgtgagaaacggcagcgtgtcgagcagcatggccgtgtagccgatggcgcgggcatcatcgaggatgcgctgcatcatcgccccggcgatgccccggccgcgaaacgcggggcgcacatacagccgcttgagctcgcacgtcgtgccggcgagccggcgcagcgcgatgcacccggccggctgcccatcgcaccacgcgacgtagagccgtccgtccggcaggccgtacttttgcgtcgggtcggcgacctcggcgtcgtagtgctgcaggtcgagataggcctgaaaatacgggtcatgcgcgacgagcatgtgcgtatattccgcaaacagctcccgcaccgcctccggtgtggcatagcccagtttcagctccatacgtgtccctcccgcgtgtctcgatggcattattttaccgcatctgcgccccgcgtcaagcccccgtgaaaaaggacgcgccgggcattgacgcgcgcgggcaaagcggctaaactagacctcagtttctgttctcggaggcgtctatgaaaacgacaaccactccttccggcaccggccgcgcgcggctgggcctgatcgtgtccatgacggtgttcggcacgatcggcctattcgtgcgccggatcgagatcacctcggccgagctcgcgctctgccgcgcggggctcgcggccgtgtttctgctgctgtattttctcgtcacgcgcaggcggctgtgcctgagcgagatcaaaaagtcgctctggctgctgctggcttcgggcgcggccatgggcatcaactggatgctgctgttcgaggcatacaagtacacgaccatttccctcgccacactcagctactacctcgcgcccgtgatcgtcacggcgctgtgcccgctgctgtttcatgagcggatgacgcgcacgcagctgctctgctttctcatgtccacgctcggcgtcgcactcatcatcggctcgggcggcgtgcagggcggcgggtcggatgtgcgcggcattggcttcggcgtgagcgccgcggtgttttacgccactgtcatcctgctcaacaagtatatcaccggtgttccggcgctcgagcgcacgttcgtgcagtttctcgcggccattctggtgctcacgccgtatgtcgcgctcacatcgggctttcacccgggcgtgatgtccgcggccgggtgggtgaacctgctcatcgtcggcctcgtgcacacgggcctgacgtactgcatgtatttctccgccatccggacgctgccggggcaggagtcgtcgctgctgagctacatcgaccccatcgtgtccgtgctcgtgtcggtgctgctgctcggcgaaccgctcgccccggtgcagatcgtcggcatcgtgctgtttctcggtttcgccatcgtaaacgagctcacgcacaaaaacgccgagacctcataagcgcccaaaacagaaaaacgccggcctgcggagcattccgcaggccggcggccgtttttatccgatatcacaaaaccatcagcagcgtccccgcgccgatgagcagacagccgatcagggacttgggcgtgaagcgctcatgcaaaaacacgaacgccagcacgagcgtgatgaccacgctgagcttatcgatcggcacaaccttcgacgcctccccgatctgcagtgcgcggtaatagcacagccacgacgcccccgtcgccagacccgagaggatcaaaaacagccagctcttcttgctgatgtccgtgagtccgccctgcgtgttggtcacgaacaccatgccccatgccatcgccagcacgaccatcgtgcggatggcggtcgcaaggttggagttcacgccctcgatgcccaccttggccagaatggacgtcagcgccgcgaacacggccgatagcagggcaaatacgaaccacatacctatccctccgtttccaacgcgggtcacgcgcgcagcaccgccgcccgcaggcggcaaaaaagtgaaatcattttctcgcgcgacatgtgcgtgagagaaaatactgctcaggctgcaagtgtggaatttgtgcgccgcaggcacacaaattctgcgcgcagcagtctgcaagccttttgtcggaaaaccctccgggttttccgacagtctcagccccaccggcctgcgatgttcgcgggccggtggggttttgtgcgtctgtcacccggcgcacgccgggccgaggagctgccggatctgctcgagatcgtcggcaaaatagatgccccgctgccgcgcctcgctcgacaggcccagctcgatcatgtgcgccagctgcgtgcgcagaccgtcgtagtagccgttgaggttatagaggatgcacggcgcgtccagctgcccgagcgcaacgcgggacatcacctccgcgatctcctcgagcgtgcccgtgccgcccggaaaggcgatgaacgcatcgcccagctccagcatcttcgccttgcgctccggaaagtcgcgcgtgacgatgagctcggtcagctcgtcgtacaaaaagccctgatccacaaaaacttgcggctcgacgcccgtcgccctgccgcccgcggcgagcacgctctcggcgagcgcgcccatgagcccgtttttcgacccgccatagacgagcgcgttgccgctctcgccgatccagcggccgagcgcgcgcaccgcgtcgcgcagcgcggggtcattgcccgcgttcgcgcccagatagaccgtaatgttcataaccggttttcctcccatgtccgcagggccgctccgccccgcttttttgcctgtgctttcaagatatcacgcccgccgcatatacagcagcgggtacggcccgccttgctcatcgcggtcggtgcgtttgtaggtcacaaagcccatgtgctcgtaaaagccgacggcctgcgggttctgctcgttgactgtgacctcccgaatgccgtagtgttccacgccgtattccagcagccgccggccgatgcccggcatcgggctgcgcggctcagcaacaggatacgccatttgccgccgcttgtaaaccccgccgccctgcacagatcgaccgcagtgtgtgcttggtcagggcctattctccagaattccccgtcattttactatctggaaattcgtgctggatattttgccactgcaaaggtatactgttattagcgccgacgagttgcagcgcgcattgcataggctgacttaatataccgtcttagaggaggggagtttcatggcaaaatgcagcacagacacatgttgcctgacactgcctttaagactggaaaaatggcaggaagaccgcctcgcgaaacggtttgagattgcccggcagatttataacaccatggttcgcgccgaactcaaaaaactgcgagcaatggaacagtccgaaccatataaagcaaatcaggaaaagatccaagcacttgactggaaaacacaaacagacaagcaagcgctgaaagcactctacaaagaacgagataagctcttacgagacggcggattttcggaatatggcttcaagtctgatatcaagaattattacaagcactttaacaacaacattggttccaacgtcgccttccacgggatcgcacctcaagtttgggctgcatttgaaaaaatgcttttcaaaaaagaaggaaaaaaagtccacttcaagaaaaaaggggacatacattccctgcgcggatattctgcagccgggaaaagcggcggcgttgagattattttccgagaaacatatattgaatggaaagggctcaaattgccgctaaagctttcaccggacaatatctacgaaacgcagatgctgagttatcgggtcaaatatgttcgtttactcagaaaacccggaaaacgcaaagaccgctggtacgcacagctctcgcttgaaggaaagccggtgatcaagtataaccccaaaaccggagaagtacggcatcccattggaaagggcgctgttggtctggacatcggtccgcaaacgcttgcttattctgcagccaccggggcggacttggtggaactcgccaatcaggtgcagaatgttgagcaggaaaagcgccgcctacagcgaaaattagatcgcagtagacgagctaccaacccaggtaattacgcggatgatggaacaattcgacgcggaatagcattgacacacaataaatcgaagcgctatctaagaacacagcaggaattaaaatatctccagcatcagcaagctgaaattcgaaagcggcagcacacagagctggccaatcatctactctcattgggcgactgcttctatgtggaaaaaatggtgtggacttccctcacgcatcgtgcgaaagaaaccgaaatatccgaaaaaaccggaaaaatcaaaaggaaaaagaggttcgggaaatccgtcgctaacaaagctccagccacgctaatcggaatactgcagcgaaaaagcgcagccctcggcattcccggtgtaattgaagttcctacctccgtcaaggcaagccaatacaatcatcaatccggcacatatacacccaagccactgtcacagcgctggaacaacatgcctgacggggaacgcatccagcgagatctctactccgcatttttattacagcattacgacccgcaaacaaacacttttgacgccaattcccttcatcaagactaccctcagtttgtccaataccatcacgatgcggtgttgcggctgtacgcaatgccaaagaccccctccagtatgggaattaaaagaagccttcgttagtgcgaaggtgttttgatcagaaaaaacggtgcagttcgcaccacaaaaccggtcgattgtccgtccggggctgccgataatggcgatatggatcgctttggcagcagaagagtttgggaaaatagtcagcgcgggtgtctgattctccgacacccgaaaagctatctaccaactcacagcgtaatccacaaaagtgcgatccgcgttttggctatatttgccgatgcaagccgcacaggctacgctgaggcaaagatgatgtcgttcggccggatggactccccataggcgatgcaagccgcacaggctacgctgaggcaaagtcacggagatccccggaggcttgcctccggggatgatgcaagccgcacaggctacgctgaggcaaagattgcaagtcagcatatcgttcaccacctttcgtgatgcaagccgcacaggctacgctgaggcaaagtggatgctgcgcgtcaggatcgtgagcatccgggatgcaagccgcacaggctactgtgcaaggcaaaagcaaacgtctgccgcaaagcaggaaatatttgaatgcgttgaaaaacagaaccaatggcactaactatgaaaacgcaaaaacaccccgccgaaggcggggtgttttgctgtcaggcgatcagatcttcgtgacgatcttgatgccggggcccatggtggacgccgtgacgcaggacttgatgtactggcccttcgcggcggccggcttggccttgatgatcgcgccgatgagcgcgttgtagttctcggtgagcttctcagcgccaaagctgaccttgccgatcgggcagtggatgatgttggtcttgtcgagacggtactcgatcttaccggctttggcttccttgatggcgttggcaatattcggcgtgacggtgccggccttcggggacggcatcaggcccttggggccgagcactttgccgagacggccgacgacgcccatcatgttgggagaggcgatgacggtgtcgaactcgaaccagttctcgccctggatcttcgcaacaagatcctggccgccggcgtaatcggcaccggcgtcgagcgcttcctggacctgctcttccttgcagaagacgagcacgcggttgactttgccggtgccgtggggcaggacgatggcgccgcggacctgctggtcggcgtgacgggagtcaacgcccagcttcacgtgcagctcgacggtctcgtcaaacttggccttggcggtcttggtgatgagctcgaaggcttcctgcggctcgtactgagcctgcttatcaatgagcttagcgctctctttataatttttacctctgaacaattcagtttcctcctaataaagtggttcgtcggatggatgatcctcccacgatcagggagcgaaatctgacggcttattcgccgaccagaacgcccatgctgcggcaggtgcctgcgatcatgctcatagcagactcgatgctcgagcagttgagatcgggcatcttctgctctgcgatcttgcgcaggtcttccttgctgatggtcgcgaccttatctctctggggcacgccggaagcatgctcgatgccgcaggccttcttgatgagcagggctgccgggggcgtcttggtaatgaacgagaagctgcggtcggcgtacacggtgatgacgaccgggatcatcatgcccatgtcgcccttggtgcgctcgttgaagtccttggtgaactggccaatgttgatgccatactggccgagcgcggggccgaccgggggagccggcgttgccttgccggcgggaacctggaatctgacgtatccaactattttctgtgccacttgaaagcacctctttcttgtaagattttaatccttgatcgcttcgacctgatcgagttcgaggtcgacgggcgtctctctgccgaacatggaaacgacgacgcggacacggtccttgtcgggctcgagctcgtccaccgtgccgatgaagccctcgagcgggccgtcggtgatcttgacggagtcgccgagctcatagccgaccaccacttcgtgatgctcgacgccgaggtcgtaaatttcctgttctgtcagggggatcgccttcccgtcggagccgacgaagcccgcggcgccgcgcacgttgtgcacgagatgccagctctcatcggtcagcaccatcttcacgagcacgtagcccgggaagaccttgcgctcgacggtcttttcaccggaatcggtgatctccttgaccgtctccatcgggatgttgacttcctggatcagatcctgcattttgcggttttccgccgcctttaggatgttcgcggctacgctgttttcgtagccggagtaggtatggacaacataccattttgcaagttcagacatgttatccacccagcttcagcagaagctgcacgccctgatcggccagcgagtcgaagccccacagcaccagtgcggaggcgagcatgaccaccaggcagaccgcggtgttgtttgccgtctgcttcggcgtcggccacacgacctttttgagctcgctcttcatgtcgcggaaccatttgccgatgcgtttgaaaaacgggagttttttatcgactttcttgacggcttcggtggaagtttctttcttttccggtttcttatcagccatgaatcattccgtcctttcgaaagtcttatttggtttcaacgtgcttggtgtgcttgcggcagaaggggcaatacttactcagttcgagcttttcggtagtgttcttcttgttcttcatggtgttgtagttccgctgcttgcactctgcgcatctgagcgtcaccttgacacgggatccagctttagccatatttttcggcacctccttattgatttcgcccctgtcgggacgtgattgcctccctgtatgagccgaaagggcataaaaagggaacctctcgactgacaggtagattcactataccacactctctgtcaaaggtcaagcctttttgcgccgccgcaaaaaggcgcaaaacgccgcctccgaaagcccggaggcggcgttgaacatatgggtttctatgcggttttgctctctcaggcgacgtcctcgaagccgggcagcggcttcttggcggtgatggcgcggatgacgaacagggccgcgaccacgagcaccacaccgatggcgaggcagatataaacgttctggatgaagcccgccaggatgtagttgacaaagcagatgataccgacggtgccggcatacggcagctgcgtggacacgtggttgacgtggttgcacatcgcaccggcggaggccatgatggtcgtgtcggaaatgggcgagcagtggtcgccgaacacggcgccggccaggcacgcggacacgccgatgatgaacaggctgctcgacgggtcgaacacataggtgacgatcggcagcaggatgccgaacgtgccccagctcgtgccggtggagaagctcagcacaccggcgacaaggaagatgatcgccggcaggaagctgaacagcgacccggccgcagagttcatgacggaggcgacgaagtacttgccgccgagcaggccggtcatgttcttgagcgaggtggcgaaggtcaggatcatgatggcggggaccatgttgatgaagcccttcggcaggcaggccatggaatccttgaaggtgatgagacggcggcacaggaagtagatgatcgtgaacacgagcgcgatcagcgagccccagggcagggcgacaaaggcgtccgtgttgccgaaagcgccgacgaagtcgtggtagtagtcaccggaagcgtcccagtaaccgccggcgtagacgaggccggcaaagcacgtcacgatcagcacggcgacgggcaggatcaggtcgatgacgcggccgttctggttgcagtcgatggcatcattgttcccgtcggcgcggtcgccggtggtgtagaggtcgttcttgaagcgggcgttcatctcgtgcaggcgcatcgggccgtagtcgaacttcatgaggatgagcgcgatgatgaacacgaacgtgagcagcgagtagaagttatacggaatggcgcgcacgaacaggtcgaagccgttgtagtcctcgacgacgccggacacggcggcggcccaggaggagatcggcgcgatcatgcacacgggtgcggccgtggcgtcgatgaggtaggcgagcttggcgcgggagatcttgtgccggtcggtgacgggcagcatgaccgaaccgacggtcaggcagttgaagtagtcatcgacgaaaatgagcacgccgagcaggaaggtggcgaacatggcgccggcgcgggtcttgatgtgggtctcggcccagcggccgaaggcggcggagccgccggcgcggttgatgagcgcgaccatggcgccgaggatgacgaggaagagcatgatgccggcgctgtcggcgacggcgggcaccataccgtcgttgatgatggcgtcaaggccggtgatcgggttaaagttggagtaaaacagcgcaccgagcaggatgccgacgaacagcgacgagtaaacttccttcgtgatgagtgcgaggatgatggcgacgatcggcggcacgagtgcccagaacgaaaacgccatgcggctggtggatgtgatctcgccggtgccctcgcaggcactgcattcttcaccctgcgagatgccggtaccattgcacgtggtgcaggtgatggactttgccacatcgtccccgtcatcggcggcgagcgcgcacacgctcagcagcgacacggccatgacgacgagcagcagaacagccaggatcttgcgtctggaattcatcttgaaattcctcctataaaaaaatgtcatgaacagagcatactgttcatgacacttgaaactcctggtcaatgacagcgctccgcgtatgcggcagtccggcggatgttctccgacggcccaggcaatcccgcggcaggaacctgcgagacccttcggcggctgcccctttcccctcccggttacctgccggtgagcgagggtactgatgacttccgcgcctctatcatgctttgttcagcaagttcagtatacggtcgcccctacgaaatgtcaaccagttttatgaccattttgtgaattttgtatgtttttgcgtttttcacaggaaatgcacatattgtttgtgcgattttaataaaaacgtgtggatggtcaagcctgaccggccaaagcgcgagaagccgccgctgcctgccggatatccgagccacagggggtgctcgagggggcagagcccgcctcgaatgggatctgtgcgttccatttgcaaaatggaacgcacctgccggatgcccggcaggtgcggaatggaacggtcgtccggctcagcggctgcccttgtcgtaggggatgccctcggccttgggggcgcgggagctcttggacgtaaaggcgagcacgatgatcgtgatgaggtacggcagcatctgatagaagtgcgcgctgatgccgatctgcgcgagcagatacacgccgtcgccgttgatgtcgaggctggtgtaggccgcggcgatgcacttgaacaggccgaacagcagcgacgcgcccgcgatgttcagcggcttccagttgccgaagatcatgacggcgagggccaaaaagccgaagcccgccacgtcgccgttggacgagcagttggccgtggtcagcgcgtagacgaagccgcccataccggccagcgcgccggagatggtcgtgccggcatagcgcatcttgtagacgttgatgccgagcgagtcggccgcctgcggattttcgccgcacgcgcgcaggcgcaggccaaagcgcgtcttgtacagcaggatcgacaggatgatgaacaccaggatgcacacataggtggccagatacaccttgttgataaacgtctcgccgaagaaaccgagatcgacggacttgtcgatgccgagcgtgctctttttgatcataaaccagctggccgagtcaccgctggccatgttgagggtgttctggttggcgatgatgcggatgaagaacagcaccagcgcgggcgccagcaggttgagcgccgtgccgccgatggtctggtcggcgcgcaggttgatcgacgcgaacgacagcagcagcgaaaacagcgcgcccatggccgccgacacgagcatggccagcagcacgaggccctgcagcgtgccccagtccccggccgctttggcggcgttgaagacctccaggccctgcatctggcgcacgaagagcacgccgatgaacgcgccgaagatcatgatgccctcgagtgcgaggttgatgatgccgctgcgctcggcaaacacgccggcgagcgccacgatcatgagcgggacggcatagatcagtgtctgttggatgagaaagctcatgcctgctcgcctccttccgcgacgggcgcatccgcgtccgggtctgtgatggccgggtccggatgcagatccgggtctccgagcgactgcgcgggctcgacgggctgatcgtccgccggcgtgtcgccggacttgcgctttttcttccggccgtcgagcagcatgcggatcacgagcgagaacgcgctcagatacacgatggccgcaatgatgacgtccgtgatgtattcgttatacgccgtgaggttggtcagctgcaggcccgcaatgtcgagcacggacatgaagatggccgtgaagatgacggcaatggggttgttgaccgcgagcagggcgaccgggatgccgttgaagccctcggccgggagcgtctggtacgtgctccagaaaaactccgtattgccggacaggtagtacagcgcagcgccgccgccggcgagtccgcccgcgatggccatggacaggacgatgttgcgcttgtcgcggatgccggcgtagcgggcgctgtggcggttcatgccgcaggccttgagctcgtagccgagcgtcgtcttgttcatgaggatgtacatgccgatggcgaagagaatcgccacgaggataccggcattgacctgcgagttcgggaagagcttgtcgagcccgagcttcgccgtggccacgtcgttataggtcgtcttgtagatgtagccggacttggtgttctcgaccaggtttttgaagttgctgatgtcgaacatccacgtcacgaggtttgccgccagccagttggtcatgatgctcgccagcacctcgttgatgttcaaaaacgccttgagcgcgccggggatcgcgccccagagcgcaccggcggcgacgccgccgagaaacgcaaggatccagatcagccacggggcgacgctgctcgatgggatgccgagcgcgatgcacagcgacacgagcgtgcccatgaggtactggccgggcgcgccgatgttgaacaggccggtcttgaacgccacggcgacggacaggcccgtcataatcagcggcgtggcgcggaagagcatattgccgaagttcgtagagttgaagccccaggtgagcacgccggaggcggtgcggccggtgctgaacaggccggcgaacacgatgcggatgccgtcccagacgctcgacgcgccgagctccggattcgagaagccgacggcggcgatgatgacgctgccgacaacgagaccgatgaggatcgacagcagcgacgcgaggatcttcttggtcatgtccttttcataaagggtgcggagtttgttctgcttcatgccgattcaccgtccttcccgctgcgcttggcgccggacatatacagaccgagctcctgcacggtcgtctgcttcgggtcgagctcgccgacgatctgcccctcgtacatgacgaggatgcggtcggacaggctcatgacctcgtcgagctcgagcgacacgagcagcacggccttgcccgcgtcgcgctgggcgacgagctgcttgtggatgtattcgatcgcgccgacgtcgaggccgcgcgtgggctgcacggcgatgatgagcggtttgtcccggtcgacctcgcgggcgatgatggccttctgctggttgccgccggacatgctgcgcgcgatcgtgacggcgccctggccgctgcggacgtcgaactgctcgatgagccggtcggcgtaggcgcgcacggcgtcgcggcggatgaagccgccgtgctggaactgcggctctttatagcgctggagcaccatgttctgctcgagcgtgaagtcgagcacgaggccgtgcttgtgccggtcctcggggatgtggctcatgttcctgccgcggcggcggatggaggcgtgcgtgatcgtctcgccgcagagcgtgaccgagccgcccgtgatcttgtccaggccggtcaggccgtggatgagctccgtctggccgttgccgtcgatgccggcgatgcagacgatctcgcccgcgcggacattgaacgacacatgatcgacggcgttgcgcttgtgcaggtgcgacaggacgcacagatcctccacatgcaggatctcctcgccggggtgagccggcgtcttgtcgatgacgagctgcacggggcggccgaccatcatgttcgacagctcctgcttgttcgtgtcgcaggtgttgaccgtgccgatgcacttgcccttgcgcaggacggtcacgcggtcggccacggccatgatctcattgagcttgtgcgagatgaagaggatggacttgccctcgcgcgcaaactccttcatcgtggccatgagctcgtcgatctcctgcggggtgagcacggcggtcggctcgtcgaagatgagaatctcattgtcgcggtagagcatcttgaggatctcgacgcgctgctgcatgccgacggtgatgtcctcgaccttggcatcgaggtcgaccttcaggccgtatttttccgagagctcctcgacctttttgcgcgcttccttgcgctggatgaagccgagcttcgtcgtctccgcgccgaggatgatgttgtcgagcacggtgaacacgtcgatgagcttgaagtgctggtgcaccatgccgatgccgagcgcggtggcatcattggggttgtcgatcttgacgggcttgccgtttttgcggatctcgcccgcctccggctggtacaggccgaagagcacgctcatgagcgtggatttgccggcgccgttttcaccgagcagggcgtggatctcgccctttttgagctgcagggtgatgtcgtcgttggccttgataccggggaactccttggtgatgtgaagcatttcgatcacatacggaggagcgttgtccataccgccacctactttcctatttctgtttctgtgtttgcatatcggcagccgccggacgggaaaccgcgctgcccggcgcgcgaaatggctcttctaatattttgattatacctgtttgatcgcctgatttcaaggcattccgccccaaatgtgtacagaatgcaaacgaaaaaaggagagaaagccaaagctttctctcagcccgggcgaaaacccggagtttttcacccgggccgagacgccgcccgccgggcggcaatggatctcatccgaggcgggcccttcgccccctcgggctcccccgcggcgcacaggtctgcacacggcgcggctgttccggggcaaacaagaaaaggagagaaagccaaagctttctctccttaaaaggaatccggtcaaattacttgacgagattgagggtgacgtgatcggtgctggcgagcttggtgaagtcgttgtcgatggtgatctcgcccttgacgatcttctcgaacatggccttgtactggtcaacggtccagttcttgaggctccaggtgtcggtcggcagaccaacagcgccctcggccgcgcccagggtggtgagcttgccgccgtagttggcccaatcgctgccgtaagcggcggtcagagcctgctgagcagcctcgccgatgcccttgagggcggaggtgatgacggtgtcggaggtgtaggactggtcgacgtccacgccgatgacagccgcgtcgttcgcggaagcagcagcggtgatggagtcgaagatggagccgccgcaggagaagatgacctcggtgccgttcttgtaccagccggaggccagggtctgcagctcagcggagggctggaagctctcgccgtatttccaggtgtagttcatctcgaccttgacgttcttttcggctgcagcagcctcagcgccctgaacgtaaccgtagccgtaacggcagcaggcatcgttcgtgccgccgccaccgccgcagaagccgagcttggtgtagccttccatgacggcagcatagccggccaggtagccgcactgctcttcacggaagctgatggcagcgaggttggtcacgccgtcgacgggcgaaccgtcaatgaacacgaacttggtgtccgtgaattccttcgcggccttctcgagggcagcgccctgcaggaagccggcggccacaacgacctctgcgccgttgtcgacagcggccttcatggcgtcgtaacgatcgtcatcggtggccttgtcgccgttggcgggcttatagtacttgtaggacttgctgttggcattggcgtacagcttcacgccatcgtaagtgccctggttgaaggacttatccttcagatcgcccacgtcggtgacgaacgcgacctgatacttgccatcgctggacgtcatttcgtccgggatgtcgtctgccttcatagccgtttttttgccgtcgtctttcttgcccgtgtcctgattgtccttgggaccgcaggcgcacagcgcaaagaccatgacgagcgcgaggagcagagcaacgagcttcttcatgttcatgctattttttcctccattaaaattttacccgacattcgggtggttttttgttgtgttttcacaactgtctttagtataccacgcgccggaattgcaagcaatcctatttgtttcgaaaatataaaaaaaatataaacaaattgggcatctgtccgtttctcgcggacagatgcccttgcgttacagatttgccatgttgacggcggtgtcgagcgcaatcgtaatcatctgcacgaaggagttctgccgctgttcgctcgtgagctcctcggcgcggtagatgtgatcggagatcgtgaacaggccgagcgcgcgcttgccggcgcgggcggcgttcatgtacaggccggcggcctccatctcgacggcgagcacgcccatcttcttccactgatccggaccgtcgctgccgtcgtcgtagaagttatcggccgagagcacgttgccgacgtgcagcgtcacgccattggcggccgccgcggcgacggcctggctgagcagcgtgtagtccgcgatgggcgcgaacgtgccgttgaggccgaactggtgcgcgaagttggagtccgtgcacgcgcccgcaccggcgacaacgtccatgaggttcaggtcgtccgcgagcgcgccggccgagccgacgcggatgatgttgtcgacatcgtagaagttgtacagctcccagctgtagatgccgatcgacgggatgcccatgccggaggccatcacggtcacgggcacgcccttccacgtgccggtgtaaccctgcacgccgcggacgttgttgacgagcacgggattttccagaaaggtctcggcgatgaacttcgagcgcagcgggtcgccgggcatgagcacggtcttggcgatgtctccggctttggctgcgatatgcggcgtgggaacaggcatgatactacctccgtttttctattttttcaggtttggccgcgcgcagcggccggttttattttaaccgcaaaaaatgcaaaagtcaaattgcaacggccctgcgcctgtggtagaatgttggagaaaaaagcgacacacgggaggcggcaccatgagcgacgtcatcaccatcggcatcgccggcggcaccggcagcggcaagaccaccatcacgcggcgcattctcgacgaattcggcggcgatgtgagcgtgctgtaccacgacaattattacaagcggcacgacgacattcccttccccgagcgcaaaaagctcaactacgaccacccgaatgcgttcgacacgcagctgctcgtgcagcatctcgacgcgctgcgcgccgggcaggcggtggaatgcccgatctacgactacacggtgcacaaccgcgcggccgagacgaccacggtcacgccggccaaggtcatcgtcgtcgagggcatcctcatctttgccgagccggagctgcgcgagcggctggacatcaagctctttgtcgacacggatgccgatgtgcgcatcctgcggcgcgacgtgcgcgaccgcggccgcgacctggagtcgatcgtcacgcagtatctgaccacggtcaagcccatgcacgagatgttcgtcgagccgtcgaagcgctatgccgatattattatccctgaaggcgggcataatcaggttgcgctcgattttgtcatggagcgcatccgggcctatgtaaaggagcgggattaaatggccaaactctactttaaatacggcgccatgggctcgtcgaagtccgcacaggcgctcatcacgcagttcaactatgaggagctgggcatgacggtctggctcatcaagccgtcggtcgacgaccgcgacggggcgaacatcatccgctcgcgcatcggcctgcagcgcgaggcgcaggtcatccacccggacgaggacatcatcgccacgttcgcgcgcgcgggccacgccgatgtcatcatcgcggacgaggcgcagtttttctcccccgagcagattgaccagctgcgccgcatcgttgacgagcagaacatcccggtgctgtgcttcggcctgcggacggattttctcacgcacttcttccccggcgcgcggcggctcatggagctggccgattccatcacggagatcaagaccgtgtgcgcctgcggccgcaaggcgacggtcaacgcccgcatcgacggcagcggccgcgtcatcaccgagggcgggcagatcctcctcggcggcaatgacagctatgtcgccatgtgccacaagtgctgggtggacaagatccgcgcgcagaaggaagcagagggcaaatgaaccgccgcgccagccgcatcctgacggtctgcgctgccgtgtggctgctggtcatctggggccactcgtgcctgcctgcggcacagagcggcgccgagagcggcgcgctgctggtcgtggtgcaagatctgctgccgtggatgaccgaccatgtgctgcgcaagtgcgcgcactttgccgagtacgccgtgctcggcgcgctgacggccgccgcgctgcgcacgagcgcgcatttttcgtggccgcgcgcgctgctgccaggcccctttgccgcgctgtgcgacgagacgatccagctcttcgtccccggccgcagcggccgcatcgcggacgtctggctcgacacggcgggctacctcaccggcgcgctgctgacactgctgatcttccgcctgtgccggaaacagccgaaagcctgaaaaaaaacaattctcagttaagtgaaaaggtgcgggaatcatgatgactcccgcaccttttaatttatttcaaatactcatactcaaacagtgtcgggacaatttcggagttataatactctttcaccagcgttttcaatcctaccagcgccgtatgcaactccacgttttcccaaaccgtatcccccgtcacttcgtctttatgcgaggtatccaattctgaagagatttggtatacgccataggtcaatgcagggtcatagttttttgcctgctttgcccagtgcaaaacggtttcccactgttccaaaagtttggtctccttatcgcctactaaaagagcttttacatcttgtagggcaattgtttctccgttcgtatcatcaaaacacagctcgttacggtaaaagcgtccgtcgctgcctgtaaatgtcctcatgtggttttgcgtttctaaacaggtaaacagaaggcattttaagagaaattgtgtcagtttcccgcttgcaacatctgcgtgatacctatccgcgccgtctgctgacttcataatgcgggcacgttccgtccacgccctgttatatgtgatataacgcgaggcgcagaacatggggagtttttcgagatagttgtcttttcgcaagaaaaagccattgccattatatatgcctgcgcgaattaaaacggcgtgtaaatcagggttatcaaagcccgggccatcaactacgagatatcccataatgttattattaaacaatggctttatccgcattttttgatttactgccaagccgccatcatgctgtagcaaaaccccattctctgtgtcatccggaaatgtcctcttgtcataataggttttgctatacatggtatgaatgcgcttaacacatagcattccaaaatcatctaatgtctcgttgggagcaatatcatagccatgaatttcaatattatcaatgtttgcctctgcctgaccccaataggcgcacatgatgcaggcatcaatatttgtgtggaagtgccgtctgttaaacgcgaaacctcctaaaaattctttattgatcaagtgctgtgctttccaatacttgaccggggaataaacaatatagctatccgttggctggcgcagataatacttgaaggcggaccaaataaaggcgttacccaaatcattggtagcagtccctttgacctcttttttcatttctgagacaacatagctgtttttccatgtggatgatttcttgcctacaccatgacgttgatgttcaacgctagttgtttcagcgtagggcgggttttcaaacaaaatcaccgtgcattgcggattgtcaaggtactgcttaatgacggaattttcaatatattcacggcttaaagcgtccgcacctgttacaagtccggcgttgaatgtctcagctgtttcaacaggcgggataatatggcgcacttttgcaccgagcaattcttgtagcaccttgtattcgtaatattcgaccgtagaaacaatacaatgcgtgagttcatcgtccgtcaatcccgcctcaagattgcctgtccctgcacacctgtctagaatgatatagtcatttccggcgggcacacgagcaatagcggcacgtacaagttcgatcgacttttcagcgtaaagatgatgtgtatagaatgcaccaaggttctttttctgcaaggtgtcatttaacttgtccatcaagtagttaaacttgatgtttgtctgtccttcataagggtatatatactgtgcaaagtgaactggttttctgatttcaccaattgttttatgcttgcctgtgtcatcacccaaaaagtcctctttgcgcgctgtgggaacagccttgtaaaaagatgtagcccaaccgacgatgcagttttcatcaatatgtattttggtaaaactattttctttgagcaaggcaacaataccttcagcatcaagttgcttttcataatgcagcacccgctcagcatctccgccaataaatccgctgttatcctttgatgcaccgccgaaatacagcttttcaatatccgccaaataaggcgcggatcggtacagccaaacgcacgcggcgttcacatctatgatcagaatgttagctggaacaggcttccccttgacacgcagagcagacaggtatttgatacactgaaacagcacagagttcaaatctgtaacgtgaagcttaaactctaacagattgccattgataacgccatcgttgctgtcagatataatttcatcaatatttaattggggatcaacacgtggaagaaaagtcttgtaaaaatcaagctgaccatctctttccaagacatacttatccataacaagcccgccttttccgctaataatccgcgccgtttcacggctatcgtgacaggccattagaggcttatcatggtttatgcaataaaccatgaggctggccagcctcgattttttgtatgcctattatagcattttctgcttaaaacacaaggaataattaacaagggcaaaagcaaaaccccgggaacctgtgcacgatgcacagattcccggggtcatttttatgccttatgccttcacgcggcagacaagcgcgccgttctcggcgtccacgacgagcgtgtcgccggcgtgcaggtcgccggagaggatggtgcgggcaatgagcgtctcggcgtggctctgcaggtagcgcttgagcggacgcgcgccgtagaccgggtcatacccgttggcgatgatgagcgccttggcggcgtcggtcatctcgaggttcagcgtgcggtcagccaggcggctgcgcagggcggcgacgaggttgtcgatgatgtgcgacaggttgtcgcgcgtgagcggacggaacatgaggatctcatccagacgattgaggaactccggccggaaggcgcggcgcagctcgccctgcac

SEQ ID NO: 13951 - DNA, 29489 bp, Unknown
  gut microbiota DNA sequence
ctcaccctatcccggataccgccacggcactcccaaaccacccgcgctaccagctgcgctacacccggatatggaatttcgcaatttgcataaaataaagtttaacatattctttagaaatgcgcaacggttttctgcgttgcagttttcgggcgcgtgtggtatgctctaaacatcaaatcaggacttgttatgacaggagcatcaacctatgagaatgcgaaaaaagcccaacctcgtccctcgcatggagcgctgcgcggccacgctgatcactgaccccgaggcgctgcgcggtcactggctggagcacttccccggccatcaggcgctgcatctggagcttggctgcggcaagggccgcttcacggcggacaccgcggcacaaaatccgggcatcttcctcgccgcgattgaaaaagttccggacgccatggtcgtcggcatggagcgcgtgaccgagcgcgggctcgaaaacgtgcgctttctcgaccgggacgcagccaacctgctcgacatgttcgcccccggcgaggtttcacgcatctacatcaacttccccgacccatggaaaaaatcccgccagcacaagcggcgcctgacctatgcgggctttctggcgctgtatgcaaacgtgctgccgctcggcggcgagatctggttcaagaccgacaacgacccgctgtttgccttctcactcgagcagttcgagcaggagggctgggagctgcgcgaggtcacacacgatctgcacgccgacggccctgtcggcgttatgaccgactatgaggcgaaattctacgatcagggcatcacgatcaaccgctgcgtagcggtgaaaacggaggacacgaaatgcgacttgtatcctggaacgtcaacgggctgcgcgcctgtgtgaccaagggctttgcggacacgttccgcgccctggacgcggatattttctgcctgcaggagacgaagctccagcccgggcagattgcgctcgacctgccgggctaccatcagtactggtgcagcgccgagaaaaagggctactccggcaccgccgtgttcacgaaggccgagccgctcgacgtacagtacaatctcggcctgccgcagcacgatctggagggccgcgtgatcacggccgaatacccggaattctacctcgtgtgcgtctacacgccaaacgcccaggacggcctgcgccggctggaataccggatgagctgggacgatgcgttccgcgaattcgtctgctcgctcgaccggcacaagccggtcgtcatctgcggggacatgaacgtcgccgcagaggagatcgacctgaaaaacccgaagcgcaacgtcggcaaccccggcttcagccccgaggagcgcgcgaagtttcaggagctgctgcacgccggcttcacggacacgttccgcgccctgcatccgaacgagacggacgcctactcgtggtggagctaccgcttccacgcgcgggaaaacaacgccggctggcgcatcgactactttctgtgctcggaccgcgcggcggaaaaggtcgagacggccagcatcctttccgacatttacggcagcgaccactgccccgtggagctcgagatcgcatggtgaagatcggaaacgtcgagatctgcggcccgctcacgctcgcgcccatggcgggcgtgaccgatgcgccgtttcgcgcgctgtgccgcgcgcagggcgccgccctcacctgcacggaaatggtgagcgccaaggcgctggtctatcacgatgaaaaaacgaagcagctgctctggtcgccgccagacgagcaccccgccgccgtgcagatcttcggccacgagccggaggtcatggccgaggccgcacccatggcgctggcatactccggtgcggacattctggacatcaatatgggctgcccggtgggcaaggtcatccgcagcggcgacggttcggcgctcatgcgcgatcccgagctcgccgggcgcatcatcgaggcggtcgtcaaggccgtcgatgtgcccgtgaccgtgaaattccgcaagggctgggacggcggaaacgtcaacgccgtggcctttgcgcagatgtgccagcaggcgggcgcggccgccatcgccgtgcacgggcgcacgcgcgtgcagatgtatgccggccgcgccgactgggacatcatccgcgacgtcaagcgcgccgtgacgatccccgtcatcgccaacggcgacattttttccggcgcagacgcggcgcacatcctgcgctacaccggcgccgatctggcaatggtcggccgcggcagcttcggcgacccgtggctgttcgcacgcggcaacgccgccattgccggcgagccggagccgccgctgccgccgctgcgcgagcggatcgaggcggcactgcatcagatcgaatttgccgccgagatcaagggcgaacggctggcgtgcctcgaggcgcgcagccagttttgctggtatctgcgcggtgtgccgcacgccaatgtctacaagcaggaggtcgtgcacgtcgagacgctcgacgacctgcggcgcatcacgcgcgccatccagcgcgacttgcgggactgaccgcagaaaggcaaggaaaccatggaccgggacgaggaacggcgcatcatcgctcaggtgtgcgccggggacaccaacgcctttgaggcgctggtcgtcgcctaccagaaacaagtgtataaccttgccctgcgcaccgtcggcaacgaggaggacgccgctgacatgacgcaggaggtgtttctgcgcgcctatcgggcgctgggcacgttccgcggcgagagcaagttctccgtctggctctaccggctgacgacgaacgtgtgcatcgacttcctgcgcagccgccggcggcacccgaccgtgtcgctcaccgcctccgaggacgacgacgagcagccgcagttcgacctccccgccgacgagagcgtcggcccggagcagcagctgacccgcagcgaaatgcgccgctccgtcgcgcgcgggctcgacagcctgccggacgatgcccgcaagatcctcatcctgcgcgagctcgacggcctgtcctatgccgagatcggcaaggtgctgcatctcgaggccggcacggtgaaatcgcgcctgttccgcgcgcggcggcggctctgcgatttcctgctcgccgacgggaaccttcccgaccgatatgcgtcaaagcagacgaagggaggtgcagacggatgagcgcctgtgaacattaccagcagcagatcagccagctgctcgacggcgaactgccgccggagcaggtgcagacactgcgcgcacatctgcgcacctgccccgaatgtcagcgcgtttatgacgactttctggcgcttcaggccgccgtccgtgacgcggccgccgcgccgcccgccgacctgaccgcgcgcatcatgcagcaggtgcgtcaggagcccgtgccgatgccgccgcgctccgccgccccggcacgcccggcgcggcatgtgcagccgacgcccattcgcagggctgctcagccccggtcagccgcgcgaaagcgcccggccgccggccgtacgtctcccctgctgccaatctcggtcatggcggcgtgtctcgcgctgatccttggtgcaacgctctggttcgtgccgcacagaagccagccgagcggcgccgacaccgcgctcgacaatgcgcaggcgccaaccgtgaccctgtctccctccgttaaggaagaggatgcggatggtcggaagcaggacagtctccccgctccggaaagcgcgccggtgctcgacgacagcgtcagcagtctgctcttctccgtcccggcggaaagcagcgcggacagcacgacactgcacatctccgaccgcaagaccatcgaggcgctgtctgcgcttctggtgcggacgcagccggtacagccgctcgatgccgaccggacaccgctgtgcgtgctggaagagaccagcgccgacggcgtgaccacacgtgtgaccgtctggtgcgacggcaaggacgtggtcttcgtcagcagcacggatacacagtattaccgcgtgcccgacgccgccgcagagttttgccggctgacaggccttccggaaaactgaacaccacgatcggctcctttgacccggcaggcaaacgcctgccgggttttcacttgcacgcgctcccgctcccccaatcgccatttttcaatcatttgctgcaaaacgacgacaaaaaaccacaattttttgaacatccttggcaaccatttacttgaaacacgcgaaaacgtgtgttataatttatcttgtctgcttgtaccttgctattttcgtaacaaacagatgtatttcttaacaatatggtgtcttttgccatcaggaggataatgactcgtgaaacgtatcaaagtatcgaacaatgtcatcagaagaatgccccgctatctccggaagcttgacgatctgaatgctgccgggatcgagcgcatctcttccggcgagctgggccgccagatgggcctgaccccctcgcagatccgtcaggatttcagctgctttggcgagttcggccagcagggctatggctacaacgttgtggcgctgcgcggcgaggtcgccaagatccttggcatggatcgcaactactcggccgttctggtcggcgtcggcaacatcggccgcgcgctggtggagaacttctgcttcgagcagtacggcttcaccctcaaggccgcgttcgacatcaaccccgaccttatcggcaaggaaatgcacggcatcgtggtgcatgacttttccacgctcgacaacattcttgccgagctccagccggacgtcgccgttctctgtgtgccgagggccatggccaacgacgtcgctaatgagatctgctccgtcggcgtgaaggccatctggaacttcacgaacacggaactgcagatcaaagatgccgacccgatcatcgaaaacatccacttctccgacagcctgctggcgctcggctactacattgccgaaagccaggacgaggccgaggcccgcgctgcgaagaacaagaaggcctgacagcccgcaaaggaggtctgccccttgaaaatcaagcgactgatctcgttgctgctgacgctgatgctgcttgccggcacggcgcccgctctggctgccgacgccggcagtcggcaggatccgctgctgtcgcacagctttgtggacagctggtcgtctgcggtgctgagccacgccgaggccacggcgcattccgccgtgcaggccgcactggacaaagccctgcagacgcatgacgcggcgctgcacagcaccgccaccaagagccgcatctgcacgctcaacgccggcagcacagtcgcgctcaagaccggcgactgcttcaccgttctgagcgggagcgccggcgtgaccatttccgccggtgtgctcgtcgacacgaccgacggcaaaaaggccgcctccggcgcgctgcacacggcgcaccgctacatcgcctgtgaaaatctgcgggcgatcattacctgcgagcagaccgtctcgctgcttgtgtcagcgagcgcttccgtcacgcgcttcgtggatgtgcccgccggtgcatggtacgctgatgccgtggaatacgttgctgccaacggcctcatggacggcgtcggcggccgatgtttcgcgccgaatgacgcgctcacgcgcgccatgttcgtgacggtgctgggccggcttgtgcagatcaacgaagcggactacacgagcgtttccttcaccgatgtcacgcccgggagctggtacgcgccgtatgtcgaatgggccgcgcagcaaaacatcgtcaacggtatggacagcgggcgctttgaaccgaacacgccgatcacgcgcgaacagatggcgaccatcatcgcgcgctatgtgcagagcaccggaaaagcacttcccacgatcaccgaccctgtcacgctgcgggatatgaacgcggtctccgactgggcgcgcgacggtgtggagctcatgcgcacgaccgggatcatcgccggtgatgagcggggttacttcaacccacgcggacttgccacgcgcgcacaggccgccacggttttcatgcggctgcgggaagcgagcctgcgctcgcaaacacaatcataaaacgatcggatcggcggagccagcggctccgccgatctgcacaaaggagttttctcatgtctgatacgatcgccgccattgcgaccggcaacgtcctgtccgcgatcggcatcctgcgtctgtccggtgacggggtgctcaccgttatcgaccgcgtgtttcgcccggcgaacggccgccccatgtccgaagcaccggatcgcaagctcgtctacggcgctttttgcgacaccgacggccaaacgctcgacctctgcctgtgcaccgtcagccgcgccccgcacagctacaccggcgaggacacggccgaactgcagtgccacggctcgccggccgtgctgcgcgcgggactgcaggcgctgttcgccgccggggcgcggcaggcgctggcgggtgaattcacgaagcgcgccttcctcaacggccgcatggatctcacgcaggcagaagccgtcatcgacctcatccacgccgaaaccacgctggatgcgaaaaatgccgccgggcagctcggcggcgcggtgctgcggcgcgcgcagaccgtatatgatgcgctgcaggacatcgccagccactaccacgccgtgatcgactacccggacgaggacatcccggactttcagctcagcgcctacgaggccacgctgaccaactgcatcgaccagctccagcgactgctggacacgttttcccgcgcaaatgtgctccacggcggcgttccggccgtgatcctcggccggccaaacgcgggcaagtcctccctgctcaacgccctgctcggctacgagcgcgccatcgtgacggacgtacccggcacgacccgcgacacgatcgacgcgcgcgtaacgctcggcggcgtgctcctgcgcctgaccgataccgccgggctgcgcgacacggccgaccccgtggaggccatcggcgtgcaccgggcactggacgcagcggcggacgcggcgctcgccatcgcggtgtttgacgcggcgcggccgctcgacgatgatgaccggcaggtcatcgcggccgcgcaggcaacgccggtgcgcatcgcggtgctcaacaaggccgatctgcccgccgccgtgcagccggatgcgttggcggcgcagtttgacgccgtgtgcgtgctctcggcaaaagagcgcacgggtctggaggcactcgagcaggcaattgcggagcgcttccccgccccggacgcgccggccggcgagatcctcacgaacgctcgccatgccgaggccatcggccgcgcgctggagtcgctgcgcgccgcgcgcgaggcgatgctgctgggcgtgacgcccgacgccgtgctcacggaggccgaggaggccatggccgccatcggcgaactgacgggcgcctccatccgcgaggacatcacgaaccgcatcttcgcgcgcttttgcgttggcaaataaatttggacagcaaacggccgccggtcagaaaccggcggccgtttcgtatgcagtttcagcgaaacacgatgccgttgcgctccgacgtgcgcaggagcacaacgccgagcagcagcgccagcccctcatagatgcccatcgtcagccagacagcgttgccgccaaaaatggccggcacggcaaaaatgaccgcgctgtcaagcaggaagctgcggcataggttcaaaatgaccgcctgcttcgtgcgcttggtcgaatagagataggccgatatgagcgtgttcacgctcatgatgataaagccccaggcatagcgcggcatgtactgcaccgtgcaggcaagcgtcaacgcatcggcaccgaacattttgcagattggcccgccgacgaacagcagcaccacgttgatgagcgtgctgccgatcaggtcaatgagcacgcccgcgcgaaaataccaccggagctcctgcgcgtccttcgcaccatagctctggccgagcagcggctgcaggccgctcgagacgccgatgaagatggccgcggaaaacgacgccacgtagcagatgatcgaataggcgttcacggccatgtcgccaaggcggccaagcaggacgtagttcgtacacagtgtcgccaccgggacggcaaactgcgcgatggcctccggcgtaccgcgcaaaagcagcttgcgcgcgagcttgcccgaaaaacaaaaccggcccacccgcagctggccgcggcgcaggatgaagtgcgtcgatacgatcagcataccgcacgtctgcgagatgccggtcgcaatggccgcgcccatgagtcctttttgcagcgggaacacaaacagccagtcgaggaagatgttgatgaccgtcgcgatcgtggagcccacgcttacgagcacgggcgaaccgtcgttgcggcagtagttgttcatgaacgtcatcagccccgacggcaccgcgaaaagcgaataccagaacaggtagtcgcacacgagccgatgataggtctcgtttgcgccgagcagcgttgcgatctgagacgtgagacacgtgccgatgagcgtcataatgatcgcggccgtcagcgtgccggcaagcgagtgcatgaacgcctgatttgcgccggcaatgtccccgcggccgatgcgcacggccgagaccgtcacgccgccgacgaccgtgagcatgatgatggcgttgagcaccatcacaaacggccagaccagattgaccgcgccgagcgcatccgtgccgacgccctgcccgacaaaaatgccgtcgatgatcgtaaagagaaaataagcgcagttgccgagaatcgtcggcacgacatactgcgtgagctttttctttctgctgtccatgagcccctccgagcgcataatttgccgctaaacgcacagacttccggccgtatgcacgcacacggcgcgtcccggccggaaatctgtccttattatagtggcttgccaagccgctgtcaagcaggacgaccgcctgcgcaggtgcgccagaaaccgcttgaaagcctagtaagcatatgttattattatagtatgtaatttaaagggggactgcccatgaaaatatctacaaaaggccggtatgccctgcgcatgatgctcgatctggccacgcatcagggcgacggctatgtcgcgctcaaggacatcgcgcagcggcaggagatctcgaaaaaatatctggagcagatcgtgcccatgctgggcaaatccaacattctgcgcaccacgcgcggctatcagggcggctaccggctggcccgtgccccgcaggattacaccgtcggtgagatcctgcgcctgaccgagggcgggctcgcgcccgtggcctgcctcgaccagcatccgaatccatgtccgcgctgcggagagtgcgccacccttcccatgtgggaagggctggagcgcgtcatctgcaactacctcgacggcatcacgctgcaggacctgctcgagcagcagacggcacgcgccgcgaacgactacgtcatctgacgcggccgcgtacttcccatgcaggcccggcaagcgcaccgcaaacggcgaacgtgccgctcgcccacggctggatatttggtattaccagaaaagccggcgtgtgaattctatgtttttcatagtttccgaccatcgcgcaggaacacattgctgattatttatcaattttgcattttccgcttgccatccgtggagattcgggttacgatgatgctgcgtcacgtggtaataccacagagggagctcacctgccgtgtacgttccctggcgcccggtgcgcggccacccttcacgtcccggatagaccgtcggtcatgagccgcccgatagcgcctcttcttcccaaccggctgtcaaaaaccgcagagcccgaccgggccctgcggttttttcatacgctgtgtgacgtctgatcgggatgactatagagcgagaacgcgccgttggcaacgctgtcgagcatatcggaggtgaacgcctgtgcgcgctcggcgtcacggtcgagcagcgcgcggtagagctcgagtttattctgatacaggcggttggcgccgtagcgctggcggtacaggctccagaagtgcagcccgtagctgtggatggagttatacagcagcggcaaaaacgtattgcgcgacaaaacgctcagcgcatggtggaactgaaacgtcgcctcggcgccctcctggtcggtttttgcgtccttgattgcgtccagcatgggcgcgagctcgtcaagctcggcctgcgtggcgcgctcgaccaccagcttcacgcacaggcactcgttcgcgctgcgcacttccataagcgagcgcacctcatcgtcgcgcatgacgccgccgttatagttcagcagcgccgtaagtgtatcgagcgagccggtcttgcggtaatcgctgacgtacacgccctggcgcgtcacgatctccacgaagcccatcttctccagctcgatcaggccggccgagatcaccggccggctcacgcccatgcgcgcgctcagctcccgcgccggcggcagctggtcgccgggcatcaattccccggaaatgatcatgctctcgatcttctgcacgaactgatccgtgagcgagaccgcctcaatcttgtcgaatcccatcgttccgcccccaaaatgtatttggtattaccaagtgcttttcgttttgaatttatcatcatattgacggactgtcaagcgaaaatgtcggcatagttccgaaaatgttaaaatcgagacacatagcattgctttttcaggaatactgctatatgataatgctgaattctggtaataccagagcaagaaacaacaaccatcaggaaggaaggggaaacatttgaaagatctgaagcatctgatctactttgaaaaccttctggaagacgccaacaacgagttggtacggcaggcgcaggagaacggcagcatcgtcctcggctacacctgctatcacattccggaggtcctcctcaacgtagacaactgcatctctgtgcgactcagagcacccaagaccggttcgctggatatctcgacgtactacatgtccaactatacctgtgactacgcacgtgcgctcgtcgagcgtgcaatcgagggtggctaccagttcctggatgcgatgatcggcgtggacgcctgctcggccatgaaccgctccatggagcacttcgaggtcctgaaggtcaacagcaaggagaaattctttgtcacgcataccgacatgccgctcaaggtgaccgattactacattgattcctacaccacgcagatgcgcgagcacgtgctcaaccgtctgaccgagaccttcggcgttgatacgtccgacgaggcgctgcgcaaggccgtcgccgagcacaacgaggtctgcaagatcatcagcgaaattgctgagatgcgcaagctcgacaacccgatcatcacgggctacgagttccacatcctcaaccttgtgagctatacctgccccaaggcgctcatcctgccctacctgcgcgagacgctcgccgagctcaaaaagcgcaagccggacgccaagaatccgtaccgcgcccgcgtggccatcgtcggcagcgagatcgacgatccgagcctgacaaagctcatcgagggctgcggcgcactcatcgtgtccgaccgtttctgcttcggcagcaccccgggccgcgaggtcatcgagctcaacgacgaggaagacgtcctgcgtcagatctgccgccactacatggagaccagcgagtgcgctcgttacatctccgacgagaaggtgcaccagcgccgcgagacggccgaccgtctggcgcgcgagtacaaggcggacggcatcatctatgagcagatgaagtactgcgactactggggcttcgagcgtgctctggcgagctacatcatgaacaccgagtacggctggccggtcctgtcgatcgaccgtgtgtataacaacggctactcgggtcagctccgcacgcgcgttcaggcgttcgtggagagcctggagatcaagaagatccagagagaaaggggtgccaagtaatgggcaaggtgaaatatcccaatccgaaattcttcaaagcgaaagacagaatggactgggctgctcaggcagagaacctgaaactggtcggcggcatcttctgggacatgttcaaggagaccgactggaaaaagttcggtgagggctggaagaacattctcatttccgaccgtgaccgtatcaaagaagagtacaaggccttcgcggctgcctctatgaaggataagatcgacctcatcctcaacggtgagcgtcacctcggccgcctgtatcgcgacggcgccatgtgcaccgtccgccgtgagtggcgcggtatcaaggacacggtctatgacttctatgaatgggctcgtctgtggggcatgctgctcatgtccttctccaaggacctgatcccggctatgaaccagacgctgtactatcgctggatggtgtcttacttctgctgccacagcttcatggacaagaacatcctcggcctgcgcggctccaacctgcgcatgagccacgagcttacctactgcatctaccgctacgtcgccgagaacctcgttattctcgccaagggcgacagacgcaacggcaacagcgaggagctcaacagcaagctcgttctgatcgacgagatgaccatggcgcagatcatggccggcttcccgaccctgtacggcatcccgcaccagctgctgccggtgttcctggtctccgagatcgaccagctcacctgcatcccgtacatcgacgccgtcgagtccttcggtctcccggccgatacctgcccggttccgacgtccgagtgcggcgcgctcgtcatcgacgccctgccgcatctgggcagctgctacatctccagctccatgccgtgtgacggttccgtcatggcatccagctacttcgcccgccgcttccccgaaatcccggtgcatcacctgtgcttccccgtccgctacgaggacgagctgacactcgacgccgctgtggaagacgttaaggcgtgcatccgcttcattgagaagcagaccggcgagaagtggaactgggatgcttacttcaccgctatgaagcgcttcaacaccgagaccgactacgagctgcagaagtgggagatcaacaagaccgcttatccgcagctgatcggcccgacctacgagctgttccgcaagtggtgctatgagatggacggcggcctcgatccgcgtaccatcaagtcctgcgagaaggtcaacaagatcctcctcaagggctacaagaacaaggagcaggcctggcgcaacaagatgcgctatcgtgctatcacctggagctgcccgccgcactactacgccaacttctccaactggctggccaacagctggggcatcaacgtcgtcgttgagatggaatctctcaactacaccaagcacctcaacaccaccgacgagaccgaggccctgcgtgacatggcccgcctgtacgagcgcatggtcatgcgccgccacaccaacggcggttaccacaacgtcgtcaccgagctctggcgtcagtgcgaggcgtggaacacaaacatcgtcatcatgtggcagcacgtcgcgtgcaagaacatggccaccgttcagggcctgctcgacgagcagggccgcgagctgggtctgcacctgatctggatcccgcacgacctgatggatccgcgcaccgtttcgcgccgcaccatgcgcgacacggtctccagctatatggacaccgtcatgcacgccaccccggtcgacgagactctgcttgacttcgcggacgacgtgtgcatgtaaacttttttgaattgaaggaaaggatttaaatactatgaaatactttggcggatgcgacgtaggttccacctacacgaaggcagttattctcgacgagaacggcaaaatgtgcgccgacacgacgatccgcagcaagatcaatgcggagcagtccgcgatcgcggcgatgcaggaagtctgcgacaaggtcggcctgaaggactccaaggagctcgcttacctcatcggcaccggctacggccgcaacaaggtcccgttcgccgacgagaacatctccgagatctcctgccacgccatgggcgtgcacgtcacgaatccggaagtccgcgccatcatcgatatcggcggccaggacgtcaagggcatcagcatcgacaccgacggcaccgtcaagagcttcgcgatgaacgataagtgctccgccggtaccggccgcttcttcgaggccatggcccgctccttcgagatgagcctgccggagttctcgaacctgtccctgacggcgaagaacgtcatcccgatcacggcgcagtgcaccgttttcgcggagtccgaagtcatcaccctcgtgggcgaaggcaagccgaccgacgagatcgctgccggcatcgagatggccgttgccaagcgctgcttcgtcatggccaagaaggccggcgccaccgacagcatcacgctgacgggcggctgcgcgaagaacgccggcctgaagcaggccatcgagcacgtgctgaagttcaaagtcgttgagctgaagaccgacccgcagctgatgggcgctctgggtgctgccgagtacgctcgccagaagggtctcgccaagaagtaagccaccccggccggaaaggagcaaactatgaatcctgtggttgcaaaagtcctgaaaaagacgctcaccacttccgccaccgtcgtcggtgcgctgtttgtggtgtacttctggaatctggaccagaagctgatgggctggctctataagcaggtcaacaccatgttcgaccgcaagcccaccgacatcaagttctgagcaaatacaaataggaaccgccgctttccattacggaagcggcggttttttgctgccctcaaagatatctgcccgtgatgctgccgggatcttgccggatctcctccggcgtgccggcggcgacaatacggccgcccgcatcacctccgccggggcccatgtcgatgacatagtcggcactgcggatcacatcgagatcgtgctcaatgacgacgacggtcgcgccgcgatcgagcagcgcctggaacacgcccagcagcacccgcacatccagcgggtgcaggccgatgcttggctcgtcgaacacgaacacggaatccgtctggatgcgcccgatctcgctggccagcttcagccgctgcgcctcgccgccggagaggctcggcgtctcctcaccgagcgtgaggtagccgaggccgagctgctgcagcacctgcagcttctggctgaccgtttttctgtcggcgcagaacgggagcgcggtgttgacgtccatgtccatcagctccggcagggaaacggactgtcccgccttgttcgtcagctggatatcataagccgcgcgtgcgtaacgcgagccgcggcagtccggacaggggatgctcacatccggcagaaactgcacgtccaggctcaccacgcccgtaccgtcgcagccgggacagcgcagcgagccggtattgtaggaaaaatcgccggccttgcagccgcgcgccttcgcatccggcgaccgggcatagagcttgcgcagttcgtcgtgcacgccggcataggtggccacggtggaacggacattgatgccgatgggcgtcgcgtcgatgagcttgacgtgtgcgatgccctcggcgctgaccgcccggacgtgcggcggcagcgcgctgccgcggataccggcctccagcgcggggatcaggctctcgagcaccatggtcgtcttgcccgagccggacacgccggtcacgaccgtcagccgccccttgggaatggcgacctccagcggcttgaccgtatggatctgcgacgtggacaggcgaatcgttccgtgcgcaaacaggttcgcttttccggcgcgcgggcgcaagggtgcctccggtgctccggacaaaaacggtccgatctgtgaggcgggatctgccgcgactgcggacaccgtgccctgtgcaatgacgcgaccgccctttgcgccggcctccggccccatctcaatgatccagtcggattccttcaggatctgcgtgtcgtgatcgacgagaatgacggaatttccgtccgccacgaggtcgtgcatcactccggtgaggcccacgatgttggccgggtgcagaccgatgctcggctcatcgagcacatagagcacgccggtcgtgcggttgcgcacggcgcgggccagctgcatccgctgccgctcgccggtcgagagcgtcgccgcggagcggtcgagcgtcaggtagccgagccccaggtcgagcagccgccgcgccgtgcccgtaaaagcctcgcagatgctccccgccatggggcgcatctcctccggcaggctgtccggcacgccctgcacccagtcatacagctccgagagcgtcatcgtgcacgcttcgtccagtgaaatgccccgcagcttcggcgcgcgggccgcagcggacaggcgcgtgccatggcagtccgggcacacgtcctctttcagaaacttctcgacgcgcttcatgcccttctcgtccttgaccttggcaagcgcattttccacggtatagacggcattaaaataagtaaagtccagctctcccgcctgattggagtttttggcgtggtagaaaatgtgctttttctccgccgggccatggtagacgatgtccttctcccgctccgtcaggtcgcgaaacggcacatccgtgcgcacgcccatctcccggcagacgtccgtcatcagcgaccacatgaggctgttccatggcgccaccgccccctcgtcgatcgtgagcgaatcatccggcaccagggacgccatgtccaccgtgcgcacactgcccgtgccgccgcatcttgggcacgcgccctgcgagttgaaggccagctcctcggcgctcggtgcgtaaaaatgcacgccgcactccgggcaggtcagctccttgcccgcggcgaccagcagcgtcggcggcaggtagtgcccgttggggcagcggtggctggcgaggcgggaatacatgagccgcagactgttcaggagctctgtccccgtgccgaacgtgctgcggatgccgggcacgcccgggcgctggtgcagcgccagcgccgcaggaacgtacagcacgtcatcgacgctggctctggcggcctgcgtcatccggcggcgcgtgtaggtcgacagcgcctccagatagcggcgcgagccctcggcatacagcacgcccagcgccagcgacgacttgccggaaccggacacgcccgcgatgccgacgatctgattcagcggaatgtccacgtcaatatttttcaggttgtggacctttgctccacgtacaagcatatgatcgaccatgggtcatgcatcctcctttttgaattcattccgcgacaataccaactgcaaacaagaaaaatccgaacctctgtcccttcggacaaaggttcggatttttgatttggtggagacggagggattcgaacccttgacctctcggatgcgaaccgaacgctctcccagctgagctacgcccccacaaggcttgtttattatagcacatttttcgcatttgtaaagcccattttttctgttcccgcgattttttgtgcaaaaagtcccgcgcaagaaaattgcatcccccacttgcgcaatcgccgcttttgtagtagaatacgcttacgtggccattgacaaggctgcactagtcggggagccagcggtgtcctgtacctgcaatccgctatagcagggatgaattcccgcccccggataggccgatgtgtcgtctgcccgcagtaagcggcgttgaaggttcggtcccgcgcaacggagccctgtgaaccatgtcaggcggggaaccgagcagcattaagcaggtcactccgtgtgccgtgggggcgccgggcccgagctggctgctgtggtaacgggcatgtcgtctattcaaaggtgggtgtgcagtcttgtcaatggtcacgttttttcatgttttccgctcccggaggtgaagcgcgcaatgtatcaggctctctaccgcaaataccggccgaagacgtttgacgacgtcgtcggtcaggagcatattaccgagacgctgaaaaagcaggtcgagaccggacggctgtcccatgcctacctgttcatcggcacgcgcggcaccggcaagaccacctgcgccaagatcctggccaaggcggtcaactgcgagcacccggtcaacggcaatccgtgcaatcagtgcgccgcctgccgcggcatcgacgacgggtcgatcctcgacgtggtcgagctcgacgccgcgtccaacaacggcgtggacaacgtgcgcgccctgcgcgacgaggcggtgttctcccccgccaatgtgcgcaagcgtgtgtatatcatcgacgaggtgcacatgctcagcacctcggcattcaacgccctgctgaaaatcctcgaggaaccgccggcgcacctcatgttcatccttgcgacgacggaactgcacaaagtcccggcgacgatcctctcccgctgccagcggcacagcttcaagcgcatcccggtcgatacgatcgccgcgcgcctgaactatgtggcgcagcaggaacacctgaacctgcagccggacgcggccgcgctgctcgcccgcatggcggacggcggtatgcgcgacgcgctgacgctgctcgaccagtgctccggcagcgatgtcatcacgaccgaaacggtcatctcggccatgggccttgccggcaacctgcgcacggcgcagctgctgcagagcatcgccgatggcgacaccgcaaaaacactggaacaattccgcagcctctggcaggacgggaaagaccccgccgccctgctcgacgagctgagcatgctccagcgcgacctgctcatgcaggccgtcgccccgcgcggcgggcgtgagctgctctccggcggatacgacagtgaaacgctgcagaccctctccggcgctttcacgccggcgcagctgctggcaaacctgcagagcattcaggacgcgctcaccgccatggcggcgcagcccaacccgcgcatcgcggcggagctttgcctgatccggctctgccggccggagctgtgcgacgatgtgccgacgctgtgcgcgcgtgtggacaagctcgaacaggccgtgcgcagtggggacatcccggccacggcggcgtccgctccggcaaagccggctgctgccctgcggcaggagccccgccaagtgcaaaaagcacaacccaaaccggaaccaaaaccggtgcttgatgatgttcccccgtgggagccgcccgcaccgccggcctctgcgccaaaggcaaagcccgagccgaaaccggttcacgacgatgttcccccttgggagcagccaacgccgccggtctccgcgccgaaggcaaagcgcgaaccgaagccagtgcacgacgatgtccccccgtgggagccgcccgcaccgccggcctctgcgccaaaggcgaagccggagccgaagccggtatacgatgatgttccaccgtgggagccgccaccggagccggttgctccccccgaggagcggccgccctgggaaacgccgcccgcaccgaaaccggccccacgcccggcgccaaaggcagcgcccgcgcccgggccggccgcgccccccatcccggaaccggagccggtccccgaacccgctccagagccggagtccacccccgcgcccaccggcgcgttcgactggcaggcgctgtgcgcgtatatggagcaggagctcccggtcggcatctactattttctgctcgacccgctgcaggcgaccggcgagctgcgcgacggcacgctgacgctgcatttcagccagcaaatggtttacccgatgttcaacaagccggagatcgcagaaaaattccgtctggccgtgcaaaaactgaccggtcaaaacgtccgcgtggtcatgcagccgatggacacggtcacgcagatcaatcagcgcaagatcgaggaactggcacactttccgaacgtaacgatccgataataaaaattttttgatgcacaggaggatacaaatatggcaagaggcggttttcgcggcggttatggtggcatgaatcaggccaacgtgatgaaacaggcacagaagatgcagcaggacttcctgcggatgcagaaagagctggaggaaaaagagttcacggccaagtccggcggcggcatggtctcggcaacggtcaacggcaaccgcgaggtcacgaagatcgagatcaagcccgaagcggtcgatcccgacgacgtcgagatgctcgaggatctggtgctggcagccgtcaacgaggcgctgcgccagtacgaggccgcttccgacgccacggtcagcaagatcaccggcggcatgaagctgggcttctgaacccataaaaatcagcacgcactgtctcaggacggtgcgtgctttcatttgcgcaaaaaggcgtgctcctcgcgctggacgaggccgagcgccgggtcaaagcaggcgcggccgcgcaggacacaggtcttgccgtagcgcgcgcggaggttatcgagcgtgatatcgagctgccgctggcgcgcgcggtgctccgcatcctcgaacaggtcgagctggtgcggcgcgcacgcgggcacgagatccagcgcgcgaatgccgatgctgcgcagcggatcaggccacaggtgcgcctgctcgcacagggccagcgccgcgtcgagcagctcgctcgtcaggtcggacggatgccgcagcgccatgcggtggctgcgccagtgcaggtcggccgtgcgcacgctcaactccaccgtgcggcactgatacccctccagccgcaggcgcgcccccacgctttccgccagcgacaggagcgccgcgcgcgcatccgcctcgcagatgaggtcgcgcggcgcggtggcgctgtttccgatggacttcggcggcggcagatccgcgatgcagtgcaccggcgcgggatcgtacccgttggcgtaggcgtgcagcagccgcccgcccttgcccaggcgctgctcgagcacgtcggcgtccgccgccgcgagcgcgccgaccgtgcggatgcccagccgctcgagctgccgcaccgaactgcgcccggcgaagagcaggctgctgaccggcagcggccagaccatgtccgcaaagcgcgcacggtcaatgaccgtcacggcgttcggcttgcggtagtccgagccgagctttgcgatcgccttgcaccacgacacgccgacgctcaccgtcaggcccgtggcatccagcacgcgctggcgcacctcctgcgccgtgcgcagcgcgtcctcacggccgacgcagccggtcatgtccagccagcactcatccatgccgaacggctcgcaccggtcggtgaagccggcatagatctcgcgcacgcggcgcgaatagtcgtagtagagctcgaagtccggcggcaggatcgtcagctccggacactgctgccgtgccgcccagagcgtcatgcccgtgcgcaccccggctgcgcgcgccatctgatccttggccagaatgatgccgtggcgcagctcccgctccccgccgaccgccaccggccgcccgcgcagctccggatggcgcagcagctcgatgctcgcatagcaggcgttgatatccgaatgtaagatcatacggtccatagtgttttctccagcaaagagattatctctattataaatctcttctcgggatatttaaagcgttttcttatctaattcagatatttttcttgcgttttttcgtccgatacgatatattgtatctgaggtgctgcatatgtacaaaacctttggtgaaacgatcgcttccctgcgccgcgcgcacggcatgcgccagcagacgctggcggacgcactggctgaggccggtgtgcccgtgtcgaatcaggcggtgtcgaagtgggaaaatgacgccacgctcccgaacgcgcagcagtttctgacgctgtgccgcgtgctggacgtggacgatatcgcgggcacgttctccggcggggacgccggcggcctgctcgccgggctgaacgcggagggccgccgccgcgcgctggaatacatcgcgctcctgcgcgagagcaagcgctttgccgccgcgccggagccggccgtgctgcgcagcctgccgctgtactcgctggccgtctcggccggcacgggccagtttctcgacggggagagctatgagatgcagccggtcggcccggaagtgccggaggcggcgaacttcggcgtgcgcgtggcgggcgacagtatggagccgcgctttcacagcgggcagaccgtctgggtgcaccagcagccgacgctcgaccccggcgagatcggcgtgttcctctacgacggcagcgcctatctcaagcagctccggcgcgacggcgggcgcgtgtttctgcactcgctcaacccggcctatgccgatctggaggtctcggacgcactgccgctgcgcgtgctgggaaaagcggtatcgtgataaaagcaaaaaacgccctgcggaaatcatgtgttccgcagggcgtttttcagttatgcctcgttccagtgcagcagccgctcggacagctccgcgaccgtctgcaccgtggtcaccgcgccggcggcctccagctcgcccggctcggcatagccgtaatacacgccgagacacggcacgccgcaggcggcagcgccggtgacatcatacttccggtcgccgaccatgagcgcggcctccggtggcgtgtgcgtctcggcgagcgccgccgcgacaacctccgccttcgtgctgcgcgtgccgtcgtattcacagccgatcacgcagtcaaagagccgctcaagatcgaaccgctgcagaatcgagcacgccatcggcgtgggcttcccggtcgcgaccgcaacgcgaaacccgtgcgcgcgcagctgctcgagcagctccggaatgccgggatagagcgtgcactcatagatgccgacaggcagataccgctcccggtagcgcgcgaccgccgcctgcgcctgttcgggcgtcatggcatacagctccgaaaacgagtcaaacagcggcggaccgacaaacttgcgcaggcgcgccgtgtccgtctcgtggatttcgaagccctcgagtgcatactgcacgctgcgcagaataccctcgccggtgtcaaacagcgtgccgtcaaaatcaaataagatggtctggatcatgacaaatctccgtaatcaagatggaaaaaggatagcattgggacgcgaaattgtcaacggccgcaccggatgcatacgctgtagcaacctgaaaaatgtgaggtttcgccatgaacaacggactggaaacacgctactttctcagcgccctgaccggcgcgggctactacgcactgcacagacagtttctgcggccgccggagcgctatttctgcatcctcaagggcgggccgggctgcggaaaatccacatttctcaagcgcgtcggcgacgccgggcgcgcagccgggctggccgtcgtccagctgcactgcgcgggcgaccccgcctcgctcgacggggtctatttcccggaaaaacgctccggcttcttcgacggcacggcaccgcacaccgtcgaccccgcgctcttcggtgcgagcggcgaatatctggatctcggcacgttctgccgcacggaggcgctcgacacggcgcgcatccgcgccctgaacgccgactgcgccatgttccgcctgcgcgcgcagcagtacctcacggcggcggccgcgctcgatgcgcgcgccacgccggggctggtctatcccgaggaccgggaggcagcgcgccgccgggcaaagagcatctgcacgcgggaattcggcacgccggacaagggctcggagcccggccggtgcgagcggctgtttttaagtgccatcacgtgtgaggggcgaattttcttccctgatacgatcgccgcgcactgtgcgcgcgtgtacctgcttgacgacggctgcggcctggcggaagaatttctgcgcatcgtgcgcgcacacgccgttcggtgcgggctggacgttctctcctgccccgacccgctcatcccatcgcgcacgcaggcggtgctcgtaccgtcgcgcggcgtgggcttcctcgccggcacggcggacgacgtgccggaggggctgacgcagcggcacatccggctcgacgtgctgccagacccggtgcgccagcgcgcgctgcgccgcaccatgcgcagcgatgcccggcagcagcagctcgccctcgcaagcgcagtggagcagctgcgcatggccaatctcctgcacaacgagctggaggccgtctaccggccgtgtatggacttcgccgcgctgaccacattcaccgaccggtacctgcgcaccttccccggcacatgagcgcaaagcaccccggcaggacgcacacggtcccgccggggtgttcgtttgcaattttctcagcagcagggcgaaaagcacggattgcagcacaggttcagcaggcacatatccgcgcaccagctgccggtgccgaagccgctgttcggatagccggcgctgtaggtcgcatacgcatcgccgccgctttcgagctggtgcagcaggcgctgaaagtccggattcgtcggatccatctcggccgcgcgccgcgcatccgccagcgcctgcacgcggttgcccgcgccggagttcgccatggcgctcagggcataccagttggcgtcgcgctcggccgccggcacgccggacagcgcctgcagcgcctcggcaaaatgccgagtctggataaagttcaccgccgcctgatattccggccggataccggggtcacgctgtgcgccccagccaccataggcaccatagccgcccgcttggccgtaaccgccggtcgcgccatagctgttggctttgccgtttttgatcgcgtcataggccgcgttgacctcattcattttttccgtcgcgtgcgggtcgtccggattcaggtccggatgatattttttggccagacggcgataggccgccttgatctcctcttcgctcgcgtccctggaaacaccgagaactacatacgggtctctcattcggcgctcctcccgatctttcgttttttcatggccgcctcgtagcgcagccatacgccggagtacaaaatattgcgcagcagctccacgtcctgcagcaccggcagcgcctcaaacgccgtcgaacactcgccgagcagcatcgtcagcagcgcgtgcagatccgcatcctgcggcagcgtgcgcagcgggttatagcgcccgtgccggagatcctccggcaggtcgatcaccgcgtcgagcagatagatgaaccgccccagtgcctcgccaaacgggcgcaggcgcgcgtcccagaggtcatccgtcacaaagagctcgcccatcaggcggccaaagcaattcgccgcggcatccgggtcgccggtgtcggcctgctcgatggcggaaagttccgccatgcactgctcaatcgcggcgcattggcgcggccagcgtgcgcgcacggctgcgctccgggcgctgagcgcctccgcctcccaatatttcagcgcgctgccgtcatcctgccagtcgtcgcggcagttgttgtacgccagcacgacgttcatatcggcagcgtactcggtgtagcgtgtctgccagtaaaaatgtttgcgcagcgggtgcgcagggcaaacctccatgccgcgctcctcgtccgcttcgtacagcgccgagagcagcagcaccaggaacgtcatgtcatacgtcagcgtcaggcggccggaaaagccgtgccgctgcttgagcacccggcacaggccgcagtagcagcccttatagcgatccttctgcgcctgcgtcagcccctccagatttgcgatcacatatccgaacatacggctgcgcctcaggttttccgctggaaggacgtgccgcatttgcggcagacgatattgatcttgcccttgccgcgcggcacacgcaggcgtgtccggcaggacgggcacttgaaaaagcggtagtcatgccgctgatgccagcgatccacagcgccgcgccacgcgctggttattttatacttctggcgcagatacgcaccgttttcctgctgacggcggtagacattgcgcgagagcatacgaaaataaatgacgatcaggccaacgaccgccagcgaccacaggatgcgcgccgcataaccgtgcacgaacatgctgacgatcagcaagatcagtgtcagcacggacagaaggcgattgagtgcgtccatcccgtttctgcccatcatccattttgcaagccgttgtctcatgaccgatcacctttccaggctgctgaatttgattcttgtattttatcacacgtctatgagaaatatatcaaagaactgtaaacaccgcacctttccgcgaaaaaattgcgtttttccgcccgcgcgtggtatactgctgaaaaaacgaggaggtagcccccatgaacactccggatgcagtccccgtcgcgctcgatacctggccgcggcgcgaggcatacacgttcttctccggcctgtcggatccgtcttacagcgtgaccgtcaccgcggacgtcacggcactgcatacttacacgaaacggcgcggcctgtccttttattacgctctggtctggctgtgcacgcagtcgatcaatcacacgaccgcattccgatatgccatccgaaacggccagccggtcctgctcgcacgccgtgaaccgagcttcaccgacctgcaccccggtgcggaacaattccacatcgtgacgatgccagccggtgacgcgctggatgacttctgccgcgcggcacgcgccaagagccgggcgcagacggagtttctctgcgctgcagccgagagcgacgcgctgatctatttcagctgtctgccgtgggtctcgctcacggcgctgaccaatgagcgcgattttgacgctgacgacgccatcccgcgcattgcctggggcaaatatcattgcgagggcgagcgggacgtgctcggcctcgcgctcgaggtaaaccaccggctcatcgacgtactgcacatcggacggttcgttcaggatctgcagcagcgcatcgacgcgctggccgaggcagaataatcgtatgtatcaggccgacgtgatcttcagaccgatgatgccgataagcagcagtgcagcaaaaatgagccgcccggctgtcaccggctctttgaacaagatgaagccaacgatcacggagcccagtgcgccaatgccggtccagaccgcataagccgtaccaagcggcagtgttttggtcgcgcgtgccagcaggaaaaagctcaccgccatgccggcgaatgtgagcagtgaccagctgagctttgtgaatccctctgaatacttcatgcaggttgcccaaacgacctcaaaaattccggcaatgccgagcgtaacccatgccatattgattatctccatacaaaaaataaaaaatgcgcctgcccgcgtcttccatggtcttcgacgcggagcaaacgctcccgttcccacccggcggctggaacgcggacaggataccaaaaacaacatcttttgtcaagcggcggagcttcagcaaacggtatttcaataccaagggggcaagatagaagcactttgtccttgataattgctttcgcgcgctttataatggataaaacaaacaattgcacaaggagatggaagcatgaaaaagcaccacacaaagcaaatggcattcgtagcagtattgctagcgacacttacgcttatcggcggctgcggcaaccaggagccatcagacaccgccaccgaatcggcaccagatacagaggtaacgaccacgagagccgcgtcagcagcggagacgccagttgtactaactgagacacagaaaattgaaaaaattctgactgaccgaatcaccgagcaatataccatgacacagatagatagaatcacaattaacgatgatttgggaacagaagcggatggtgattacatcgcactcgtctatctgacttgggaccaaaagaacacaggaaaaacatccaagaaaatgctcgagatgtattcgtctgatctcgcagccacactaggcgagcagaacagttccgtcaatgaaatcgcaattttctggactgtaccgtatttaaatgatacagccaagtgcagctatcagcgaaatggggatggcttcgtcgaaatggacatggcatggggcaaagcgtttcaataatcagcatgtcataatgcatgtaagccttcatcaggtgctctgaatttccagtgcacctgatccatatttatcactattcagttatctcctactcagcactcaatggcaaagcagtgcgcacccaagagttatcaagataaaagatgcgccgcgaggccacgacgaggcaacaaaaatcgccgcagacagtttgtctgcggcgatttggcaggggaagaaggcttcgaaccctcggcctacggttttggagaccgtcgctctaccaactgagctattcccctatatgtcatgatattatatttggtgggccttcagggacttgaacccgggaccgaccggttatgagccggttgctctaaccaactgagctaaaggcccatattcaaagaatgccgccacacaggtgacggcaatatctctggcgcctcctgtaggattcgaacctacaaccctccggttaacagccggatgctctaccgttgagctaaggaggcataagcaagggattcgctcaagcgaatcccttgtgttggcattgacctatcttcccggtccgtctccagacaagtattgtcggcactggtgagcttaacttccgtgttcggaatgggaacgggtgaaccctcaccgttaaaaacaccaactatggtaaatgacttacgtcaaatactactataaaattgacctcgtgtcaagaggaaattccccgttggatgtgtaccacacatccaacggagtggtacaccatcagggactcgaaccctggacaccctgattaagagtcaggtgctctaccagctgagctaatggtgctcataaaagtggtgacccgagggagagtcgaactcccgattggggcgtgagaggcccccgtcttgaccacttgaccatcgggccacacaggttcgcatctgcaccttcaaaaccgaacagaggatgaagaattcacaaggcggtttgcctgcaatactcttgtaggtcaagccctcgggttattagtatcggtcagctcaatgcattactacacttacacttccgacctatcaacgacatagtctctgtcgtcccttactcctaatggatgggagatcttatcttagggggagtttcacacttagatgctttcagcg

SEQ ID NO: 13952 - DNA, 98749 bp, Unknown
  gut microbiota DNA sequence
aaaattgatgatcggcgagtcggcaggcgcaattatatgcgctccaagcatccaatatatcgagcaaatggatgaaaagctggaggactactcacaagaagatgatgcagggcttgatttgattgatttctatgttcttccgcattatcttacagcaccatttaagaaagttaccgagaaaataatgactgagttttcggatttgaatctatgcccaattaacaaccgtcagggaattgtaattgatggtgaagattcaaaggttatttgcaaagactaatttgaaaattccagtttgccgaaccgcgaaaccgcctccggcgcgaccattcggtcgcgccgggggcgttcctgttatctgcttatgctgcttatgctgcgtcatttcaggcgcgcgcgctgcaccgcgcagtaggcgcgcacgtcaaacggctccggcacgctgtcgcgccggagatagagcgggtggtgcgggtgtccggccttcgaccgggggccgaacgtcagccactgcgcatgaaactcctcgccgatggcgagcatttcctcgagcgcgtcgaacaggtacggccgcttttcgatcagcgtgccccacgcggcccacacagccggccggttgccgggcgcgtactgcccgagcacgtagcggaaggctgccatgttctgctcgtgcagcgcgcggttgaaggtcgtgtccatggcgttcgggtcggtcgcacgctgggggtaaacgttgaacatcgtgaagctgtcatacccgttgccgagggcgatgcgctcgacgctcttgagcgtgttgtcgagatcgcccggctgcgcggtcgacgggttgatgccgatgcagatgagcgggttttcgccccgcgtgccgaggatgtaacggtattcggtgtagtacggcggcacgtacagccagcgcgcggcgtcatagtcgtcgtgccgggtatagtgcagcgcgtcgtcaaaggtcagcagcgcgcacgtctggctcgcgcccttgggaatgtgcatgggtggtccctccgatcggtgcggtcagtccccggcgggcgggaacggtttggaataggcggtcttggcgctcacgcccggcaggcggccgatgcgccccgcgagcgcggagatcacgtcctgcggcgcgtcgagcacgacgctgatgatgctgacgcccttagcgcggtagggcaggcccatgcggccgatgatgtactgccccgcgtcgtgcagcagggcgttgagctgcgctgtgctctcgctgttttccacgatgatgccgatcagcgccacgcgcgtttccatgcgcgctcacctcgctttcgttttgtctattgtacgcgaaaatgggcgggaacgcaatgcgttcccgcccgtttcacacggaaaatcctgcttatttgccctgcttgtaaaactgcttggagttatcgagcacctggcactcggcgttcgggtagagcacgacctttttcggcgtgccgtcgtcgaggatgcgcagggcgtccgaccacgtcttgacgtattcagcgccggagtgctcgtcgatgtaccacggatcgcgcatgcccttgacggtgtgctcggcaaatacgacagcgtgggccatgtttttgcccttcgtgtagcagccggaccacatcatgccgccgggggcggagtggccccacttgtcgtacaaaaagtgcacacacgggccgaacggggagttggccgcgagcacgaacgagccgccgtccttgagcgaggcaatgacctcgggcgtgtaggcgcagttggcctcggcgggcttgaagtagttgttggcgatgaccacatcgcagtcgggcacgaactttgccgcgtagtgctcggcggcgtaggcggccgcgtgctggatctcggcctcaaagtcgccggcgaacaggttgcagatctgcgcgtggccgttgaggatggcgtcgatcttgaagtcgagccccatcatgcgcgcggcctgctcggcgtcgctgcgcatgagcgtgtgggggttgcccatgttgaactccgtcgtcgtcgtgaagctgtggttgcgtatgatcgtgcgcagcgagctcacgcccggcaggatgcacttggcgccgccgctgaagccgtagtagctgtgggccatggtcgtgccgatggcgatcttgtagtcggcggacatgacgtcggcattgatctcgacgggcacgttgttggtcgtgttgccgacgaacacgtggttaaagaacaggttgtggttgtgcacctcgtagttttcgacgatctcctcgccgagcttgcgcacgaactccgtgcggtacatgacaccgtgggtgccgagcgcgatgatgaaccagatgttctccttcggcacgccggcggcgcgcagctccgcgatgacggccttggcgatcggctcgcacggcgtcggacgggtgatgtcgtcgatgatgatgacggcactcttcttgccggcggcgccctcggagatgggcttggcgccgatggcggcgtggatcttctccacaatctgcgcctcggtcagggccggggtgtcatagccgtggatcttggagatatgcacgtcccagttgtcggggaacgcgatcgggatcggctggtcgccgtagttgctgttggaaggcaggtcaaatgttttcatagagaatcctcctgggatcgacgcgctttctcatcttccgcatcctgctcgatcaggcactcgcggtacgggccggtcagcgtcaggtggtcgtagatggcggcggccacggcggcttcgtcgcggtcacgcagggcctgacagatggcctggtgtccggcgcgcgtcagcgcgttttcgtccagccgccaggtctcctcgagcacacgcgcgcggtagatgtccatgagcgaggacagcgtggtgtagatgtatttgatgagggcgttgtgcgacatgcgcatgagcgaattgtgaaactgcgagtccagcacggactgccggtcgatcggcgtgccgatatagtcgtaatcggccagagcgcacaggcgctcgatctcgtcgtcggtcgcgctgcggatgatgtcccggcacacgtccgtctcgagcacgatgcgcagatccagcacattttccagcgtgctgttgctcagcgcgaacagcgcgcagatcggccggttgatcgacagctccggcgtgttcgtgatgtacgagccgctgccctggatgctctgtacgatgcccatggcctccagactcttgatcgcctcgcgcacgcacgtgcggctgacgtcaaacttcgtcgccagggacagctccgtcggcaatttgtcgcctttctggagctggccgtggttgatctggtcgaggacggcgtccacgatttttttatagtttgtgctggacttcggtttcatgctgtcacctcgctaagcgatattcacaaaaattgcgtcgattttttgaacattatgattatttacaaagaaaaaaagcgatggtatgattgaaataatcaaatgtgtcagacaaatttgagggcctacatcaggtcctttccttattcgccggaaagttgtctgacaattatcgggaggttttccatctgtgtctacattagcacattcttttttttaagtcaatgatttgtcagacaaatgatgagaaatgggacacggagttggaaaaaccaatacggaccgagtgaggtgagccatcgagagaaatggagagcattccccctgtatcgcaaaagcagagaatttggaatgaaaatgtaacttagaggagaagaagaaacatgtcaaacacgagcaacgcatcgaaaaatgtcaagcgtttcctgctgctgttcgcactcgggatcgcttacggctttatgtacgtcatgccgtacatgaagtccagcttctacgatcagatgattgccgccatgggctgcacgaatgcccagctcggctctctgatgaccgcttactgcatctgctgcaccgtctcctacctgcccggcggctggatcggagacaagttcaacccgaagccggttctgctgatctccatctttggtcaggcagcgctgagcttcctgttcatgttcacgtataagagctacaccatggccgtcatcatctggctgctcatgggcctgaccggcggcttcgctttctggccggccatcatgaagggcatccgcatgacgggcaccgacgaagagcagggccgtatgtacggcatcttcgaggccctcaacggtctggcttccctgctgctgagcttcatcatgatcggcgtcatggccgtcgtcggcggcagcgacctcatcaccggcttcaagagcgcgctggcattcatgggcggtctgtccatcgtgtccggcatcctggttgcgatcctgatgccgaaagacgcggcttacggcgtgagcgaagaagaaaaagaaaatcagaaaaagatcaccttcaaggactatgtgtccgcctttaagatccccggcgtgtggatcatggccatcctggtctggtgctatgtgaccatctccgccgtggccagctacctgacgccgtacagcacgggcgtgctcggcatgtccgcaacgctggcggccaccatcggcacgttccgcacttacggctgccgcctgatcggcggcccactcggcggctatctggccgataaggcgttcaagtctgtcgccaaggagcagctgctcggccagcttgcctgcctggtgacgatcggcatcttcctggttctgcccggcggcacgagcggcggtctgctcgtggttttgctgctgctggtcggcatcgccatgttcctgtgcaagggcacatatttctccatccagccggaaatgggcattccgacgcacatctccgcgacggccgttgccatcgcgacgtttgtcggctacattccggatatgttcgtgcacacgatgttcggcaactggatcgacgcctacggcgacgcgggctacacgaagatcctcttctacggcgtcggcacggcggtgctgggcgtgatcgcggccgtctgggccatcgcgcaggcgaaaaaggttgcaaagcggaatgcggccgctgccaacgcagcgtaacattccccgcaaataacaaggaggcttatccatgagcaaaatcaagatcaacacggcccgctgcaaaggctgtggttactgcgtgaacgactgcccgcgcaaggcgctgtcgttctccggcaacatcaacgacaagggctatgacaccgttcaggtcgacgacgcgctgtgcgtcgcctgcggcacgtgctaccgcgtgtgccccgacagtgtttttgaaatcctggaataagaggtaagaacatgagcaaacaacttatgaagggcaatgaggccctggcagaagcggcgctgcgcgccggctgccgtttttacagcggttatcccatcaccccgcagaccgagatcctggagtacctggccaagcgtatggacgaagtgggcggcacgttcgtgcagaccgaatccgaactcgcgggcatcaacatgctcctcggcgcggcagcggccggcgcgcgtgcgctgaccagctccgccggccccggcttctccctgaatcaggagggcatctcctatctcgtcgcggcggatcttccggctgtcatcatcaacgtcatgcgtatcggcaccggcctcggcgacatcgcgcagggccagggcgactactggcagatgacccgcggcggcggccacggcgactaccgcaccatcgtgctggctccggcctccgtgcaggaaaactgcgacatgatgaccactgcctttgatctggcggagaagtaccgccaccccgtgttggtcgcgtccgacgccgccatcggccagatggtcgaaggcgttgagctcaaggatttcgtcgagcacgacattgaccagtatgactgggcgatccgcggctgcaaggccggccaggcgccccgcaaggtccagaacgtctactacaccaacccgcagtaccccgagttcctgcgcagcaagtatcaggcgatcgaggacaacgagcagcgctgggagtcctaccaggcggaggacgccgacgtggtgctcgtggcttacggcatcagctcccgcatctcgaaggaagcggtgaacatggcccgcgccgagggcttcaaactcggcctgatccgcccgatcacgctctggccgtacccggtcaaggcgtttgagacctgcaagaacgccaaggcgttcatgacggtcgagatcaacatcctcggccagatggtcgacgatgtgaagctggctgtggaaaacaagtatccggtcggcttctatggcacgttctttggtctgccggaaccggaagagatcgtcgcgcaggccaaggccatgctggaaaaggaggggaaataaatgaaactcaaagcacccgaaactgtcttttcctccgccggcttctgccccggctgcggccacggcctggccacccgactgatcggcgaggtctccgaggaactcggcattcaggaaaaaatgctggcagtcgtggacgttgcctgctgctcgttcaacattgactactggcgctacgataccatcatggcggcgcacggccgcgacatcccgacggccgtcggcgtcaagcacatccgccccgagaacccggtctttgcttacctgggcgacggcgctgcctactccatcggcatggcggagaccattcacgccgcgctgcgcaacgacaacatctgcgtgttcgtcgtcaacaacagcgtcttcggcatgaccggcggccagatggccccgactaccctgccgcaccagaagaccgcgacctccccgaagggcaaggatccggccaagtacggcacgctcaacgtcgtcgacgtgctcggcaagatggacattgcctatctggcacgcggtgaactggtcggacctgccggcatgaacaactgcaagaagctcatccgcaaggcgttcgagcaccagctcaacggcgacggcttcagcctcgtcgagctgctcagcccctgcccgaccaacctgaacatgccgccggtgaaggcccgcgagcatgtgcacacggaaatgaccaagtatttcccgatcggcgaatacattgacaagaagggtggtaatcaggcatgatggtagaaatgatttgcgccggattcggcggccagggtgtcctgaccaccggtctgatcctggcagaggccggcatgaagctcggcatgaacgtgctgtggtatccgtcctacggctccgagatgcgcggcggcacggccaactgcaccataaagttctccgacaaggagatcgccagcccctgcgccaagaagatcgacatcctcatggccatgaacgcgccggcgatcgacaagttcgagagcagcctgcgcccgggcggcctgctgctggtcaacagctcgctcgtgcacgagcgcgaataccgcgacgacatcaaggtcgtcaaggtccccatgaccgagatcgccgcggagcatgaaaacccgaagggcgccaacatcgtcatgatgggcgccatggcggccaactccgatctgttcaccgaggacgatctggagcgcctgaccaacgagttcttcgagaagaagggcaagatcaacccgaaaaacagcctctgcttccgcgccggcacgcagatccactaaaccggcgaactccacggggctttgctcatgaaatcagcacccggggcgctgcccggcagcgccccgggaaaatcccgctctggaggtgtaaattttttgaatgtcctagacgtcatcatcatcctggcatactttgtcggcatgatcgtgctcggtctgatcgcaaacaaaaaacagaccggcgtggatgactattatctgggcggccgctcgatgggcgctctgaagatcggcgcgctctggatggccggctggatcggcggttcgtccgtcatcggtacatcctcaaacagttattccatgggcatcaccggcgtctggtatgtgggtgagatcgccatcggctgcgtgctcttcgcgctcgtcatggccaagcccatcaagcgcgtgagtgacgagctgaggaatgtcacgttccccgagctgatccacgcgcgctatgaccagaaaaacagcaccatggccagcatcacgaccatccttgcgatgatcggctacacggcggcgcagtttgttgccggcgcgtcgatcctgaacgtgctcacgggctggaatctcggcgtgtgctacatcctcgcggccgtggtcatcgtgttctatgtctcgacgggcggcctgctcgccgtgacgtataccgacatcgtgcagatggcgctgctgctgctcggcattgtcgttctggcggtgccgctggtcggctcgcagctgcacaagatgggcgcaaacctcgtcaccgacctgccggcgagcttcttcgacctcggcgcgtggggctggccgacgatcctcgcgctcggcctgtcgaccatcatgtcgtttttcacgagcatggacagctacacccgctgcatcgcggcccgggacgccaggaccgcccgcaccggcacgatctatgcggccgtgctcgtgctcatcatcgccggcaccagcacgttcctcggcatggccggcaagctcatcctgcccgacctgtcgtcgtccaacaacgtcattgcggcgctcgtggtcgagctcttcccgcacgggctcaagggcctcgtgctcatcggcgtgctcagcgccatcatgtccacggcggacatttccgtcctgaccggttcggccagcctgacgaaggatatctaccagcgctacatcaaccccaacgcatcggacaagacgctgctgcgtgtgggcttcggcgcgtccctgtttgtgggcgtgctcggcgcgatcttcggctggttcacgcaggacatcatgaacatcctgctcatcacgttcaccatcaactcggccggcctgtttctgccgacgctcggcgcgttcttctggaagaagtcgtgctcggcgggcgcattcgcgtccatgctctcggcgacggtcatcgccgtcgtttggttcatcggtggcaaggtcagctcgctgccgctgttttccatcgacgcgctctggcccagcttcggcgtgtcggccatcctgtacgtcgttatctgcctgacgcaccaccagaccccggcggagcaggaaacggcggagaaattctacgcggcgaagtgagccgcaaagcccccatcccaagataggagtattgtcacaatggagcaaatgaagaagatgcccctcgaggggattcgtgtcgtggagctggcgacggtcgttgccgccccgaccgcgtcgcgcgtgctgtgcgcgttcggcgcagaagtcatcaaagtggaaaccaagatcggcgacgagatgcgccgcgccggtgagttcgagatggtcgtgtgcgaggacgataaaaacccgctgttcaccatccagaacagcggcaagcgcctgacgagcatcgatctgaaaaatccggacggcaaggccgccttcctcaagctgctcgagacggccgacgtgttcctcacgaacgtccgtctgccgtcgctgggccgcctcggtctcgattacgagacgctgcacaaggcctaccccggcctcgtgtacgcgcacttttccggcttcggcccgaaggggcccgacgccgccaagcccggctttgacagcacggcgttctggctgcgcagcggcccgatggccgactggcaagtgcccggctcgttcccgttcacgcccacctacgccttcggcgatatggccacgagctcggcgttcctgtccggcatcctcatggcgctcatcggcaagaagagcaccggtatgggcacgttcgtgagcacgtcgctgtttgccagcggcatctggtgcaacgccatcggcgtcgtgtcgcaccagccgcagttcggcggcgagcgcccgaacgaccccctgcgcccggccgacccgttctgccacttctacgagtgcagcgacggcaagtggatcggcgtgttcgacaatgagtaccgccgcgagctgccgaagtttgcaaacctgttcggcatgccggagatcgccgacgatccccgcgccgccagcctcgaggcgctgcacgagaccgacttcgtcgtcgagatcgtcacgcggctcaacgccattttcaagaccaagacggtcgccgagtgggaagccttcctctcggaaaacaacgtctcctgcgagcgcatgcgcaccatccgcgacgtgagcaccgatgagcaggccattgccaacggctatatccagaaggtcaccttcaaggacgatctcgaggtcatgatgccgtgcccgcccatgcagctgacggagtacgccacgcgcccctacacgtccgccggccgcctcggcgccgatacggacagcattttccacgatcttgggtataccgattcggaaattgccgccatgaaagacagcggcgcgatccagtaacacaatataaaaggagaaagcgcatatgaaaatcgttctggcagaagtgccctacaccaaagacagagacatcagcgtggaaaagtcctgcgtgccggaaggcgcggagctgaccatggccgtgttcgacgagcacgctgagaataacgatgcgttctacgccgcgatcaaggacgccgacatcatcatcgacggctacgtccacttcggcaagaaggagatcgacgccatggatcactgcaaggtcatctccttccagtccaccggctacaacgaggccgacctcgactacgcgaaggaaaagggcatcgccgtctgctccatcctcgactactgcacgcaggagaccgccgagagcgccatggccctcatgctcaacctccagcgcggcatccgccagtatgaccgcagcgtccagcaggatcacgtctgggattaccaggtcgtgccgcacctcaagcgcatcgccggtcaggtcatgggcatcgccggtctcggccgcatcggccagtccgtcgcgcgcaaggcgcaggcgttcgacatggaggtcattgcttacgacccgttcctgccgcctgccattgccgagaacctcggcgtcaagctcgtcgatttcgacacgctgctggccgagtccgacgtgctgagcctgcacatgaacctcaccgaggagaactaccacatgttcaacaaggaagcgttcatgaagtgcaaaaagcaccccatcatcgtcaacgaaggccgcggcccgctgatctgtgacgaggatctcgtctgggcgctcgacaacggctacatccgcggcgccgcgctcgacatggtcgagagcgaggatccggatctggacacctgcccgctcgtcggccgcgacgacgtgctgctcaccccgcacagcggctactactccgacacgtccaactatctcgtcgcaaagctgtccatggacaacgccctgtactacgtcaacggcgagtacgacaaggtcaagtccatccgcaacggcgtcaacgcctgagcaccctcccgcttgtttccgctgggcagccaatttccattttcttttttctacccttctttctgttctgtttttgcgatttcaacggatatatcttctctcctaccagccgtccagtggattccaaatatccgtgtccgcgtccggtctccggcacggacacgggcctgaaaacccgtatgtaccgggcgccgtgtcaggtgcccggtgcttttttgcggttgacactgcccgacgggaacagtaaaatgaaaaggacgggcgggggcccgccagagaaagggaacgtttttttagatcgcggaggtgtttcctatggaacctgcaaaagtatatttttccgatctgcgcgcggatgagatcagcacgctcgagaagctgcaccggctcatgaaggcggccggctttgagcagatcgatttcaaggacaagtatgtcgccatcaagctccacttcggcgagccgggcaacatggcctatctgcgcccgaactgggcgcgcgtcgtgtgcgactatgtgcgcgagctcggcggcaagccgtttctcaccgactgcaacacgctctatgtcggcggccgcgccaacgcgctcgaccatctcgacagcgccatgcgcaacggctactcgcccatgaccaccggcgcgcagtgcatcattgccgacgggctcaagggcgaggactacgacctcgtgcccatccgcggcggcaaatatctgcgcgcggcgaagatcggccgcgccatcatggatgccgatatcttcatctctctctcgcatgccaagggccacgtgtccgccggcttcggcggcgcgctcaagaacatcggcatgggctgcggctcgcgcgccggcaaggaggagatgcacagctccggcaagcccatcgtcgatcaggataagtgcatcggctgcggcaagtgcgtggaaaactgcgcccacaacggcccgcacatcgaaaacggcaagtgcaccatcctgaaatataagtgcaccggctgcggccgctgcatcaacgtctgcccgatgcacgccatccatgcggactatgcgatcgcaaacgagctgctcaactgcaagatcgccgagtatgccaaggcggtcgtcgacggccgcccgtcgttccacatcgcgctcgcgctcgacgtgtcgccctgctgcgactgccacaatttcagcgacgtgccgatcgtgccgaatgtgggcatgttcgcgtccttcgaccccgtggcgctcgacaccgcctgcgccgatatgatcaacgcccagccggtcaacccgaacagcgtcatcgcgcgtgagcatgaccatccgcacgaccacttcacggccgcgcacccggacaccgactggcgcgccgccgtcgagcacggcgaggccatcggcctcggcacgacgcactacgagctcgtgacggtgtgatatccgctttcatgcaaaaggctcccccggatgggggagccttttttgttatatgtattctctttgggtgatccgttttatgatcgcccgagccagaagtccggcgacgcctatcttttttgcaacatgcttcttgccgtgcagatagagtgccttgacctcgatgcccgctatatcctccgcggtgagcggatcatcgccgagaacgacgaaatcggcaatcataccgggtgcaagcgtgccgcgtttattctcctcatggctcatatacgcgggatttgccgttatcatgcgcagcgcgtcgagacgcgatatgcgctcgtccggattgggatgatttacggagcacgccataccgtacaggggctttggacgcgtgcacggtccgtcggagccgtcgcctacgataagcccgaggcggtgcatcgttcccagcgcgtttagtctgtcagtgcgctctctgccgagcaccgagcacagatactcgtccggctcctgcttccaatatataaacggcgactgcgcggctatgcacagctttatctttgccgcgcgctttagctgctcctcgcttgcaaggcagacatggatcatcacatggcgcgcatcgtcccacggcttatcggcataagccgcctcatatgccgttatgcactgctccaccgccgcatcgcctatggcgtgcatggttatctgccagccctcgcggtttgcgccgatggcgaactcgttcacgcgctcctgcggataattcaaaacgccgtagttgttcggattgttcgcgtacggctccttgagcgccgcgtcctctgagccgaagcagccgtcgagggcaagcttgaagcagccgccgacgcgcttgaagccgtgctttttcacggccttgaggtccatggtctggaagaatatgcggaacgcctgcggcaggccgggcgcgagtatttttatcatgtctatatccagatcgtttgcaaagcccacgccctcaacggtgtgcacgagcccgatgccgaccgacgcaaggtactccgcgcctccggagagaccgcgtataatatccatcgtggggatatacgccgttgcctcgttcacgccgttataaaacgccgactggtacagccatccggtctcggtattgcagccgggatcggatttcaccttatccgacagcagtgctagcattgcgctgttgcacacggcagcatgaccgtcgtacttcatgaccatgagcggacgctccgtccagtcgtcaagatcgcgcttttcgggcagccgatgctcggcaacggtgttcgcggtgcagccgtagcccatgagcaccttgtttttccggtgactgtcggcatagcgcctgaccgccgcctttgcttcggcaaaatttttgacatccatgagatagaatgtgttctcgaaaacgcacagcgagccgaaatgcatatgcgtgtcgccgaacgcaggcgttaccgtcgcgccgccgagatcgacccgttttgccttgccgtagcgcggagggatgctgctttcatcgccgagccacacgatgtgaccgccctttaccgccatcgcggtgtaaatgcggttttccttttcgcaggagatgaatctggcgttcgtataaagctccataacctcattcctttcacttctaaaatgggctccatgtagacatggagcactacagcctgtttcgtaaagacaagtgtacagcgggggagcgcgaggggggtaagcccccgctcgcaattggatcatagccatcaaaaacgactgaaaaactgattgatcagttttatcaggctttttgacgagcgcagcgagattttttgtgaaaatttatttttacaaaaaatgtggcgtttttgaaacgtataaaaaagtctctgacttttggtacgctgaggggctccatggtaaacatggagcccaaatgttttcagccttcgggtatgtgtatctcgcggatgagaaaatccttgcccgaaagtatgattttttcaaagctgccgcagttggggcaatagccctcgtgctcaatgacatggaacagctcgttgcattcgtcgcattcagccatgccgggaatgacatttatcacaagctttgtgtccttgagccatgtatccccaacgacgacgggatatatatcctcaacatacttggggatgaccagcgacagctcgcctatatcgaggacgatctccgcgacctccttaatgtcgtttcgctcgcaaaatcggtgacggttttgaccattgagcggacaactccgatctcgtgcatagcggctgcttactttcttgcgatcttcttggtgacgagctttgcgactgccgccggagcattgccggctgcgccgcagccgaggcagcgggaggtctctatcttcatctgctcctcggtgaaggtaccacgcaaatccttgaaggttttctttgcttccttggcagagccgtcggcggcatgctgtctgggagcagtgtcgaagcccgcaacggaaatgcctgcggtggcggtgttcatcgccttataatcgcgtctgtcacggccgatgacctgcgactgaccgggatgtacatagcgtctgttcgccattgtttttccccgtataatttcccccctataaatatattttgcagtttaggtctatcaataatttatatcatgaaactatacgctttgtcaattatttagcattggcattaagtaactgttcagctattttttcagaggcacattgacgcacccattggctcccttgtgtaaagggaggtgggttgccgcatggcggtaagccggagggattgtgccactcgccgtggcgggcattgcgttaccaacactggtagtgggtttagctgcgtcatctcgacaataacaaaccgcgaatatgcgggcgaccaatggtcgcccgttttttattgtttcgtcggcaatcaccggtcgggatgccgcaacaaccgtactggcaggcgcgtcagttcgtctccaaaaagaagtccttgtcgattatcgcctggagcgcctgctgcacggcggtgtcgaagccgagctcacgcagcttgcacacgccctcgatggtcgtgccgccgggggagcacaccgcgttcatgagtgcgattgggtgctcggagctgttcatagcaagcgcgccgctgcccataaccgtcgcggtggcgatctcctcggcgatcggtcttgcaaattccgcgcggacacccgcctccgccagagcgtcaatgtacatcaaaacaaacgcgcccgatgccccgccgagagctccgaatgccggaaacaggtcttcatctatatggtacaccttgtacgccttgccgaccgacgagaatatcgcgtcggcggtttttatatgtgcgctcgttgccgccttgccgccgtatatcgccgttacggagactttttatacttgaagtcgcttaacaacgagtataaattggatattcaacaatagagaaaacgaccataccaggcacgaagcccgatatggtcattattcttttgcaacccgcttgaagaatgccagttaaaaatatgttttttgcatatccctaattagcaccttctgatgggggagccttttgctgcctcgcgggctttcagtccagcagcgcgagcgcctgcaaaacggccgcggccgacgcatcggccgcgtgctgctcgaactgctcgaacgacgcggcggccgtgccgtcggccagatccgagatcgcacgcaccacggcaaacggcacgccgctcatgctcgccgcctgcgcgaccgcgccgccctccatctccgccgccatggcggccgggaacgcgcggcggatggcggcctttgccgccgcgccggagatgaactggtcgcccgtggcgaccaggccgcggtgcacccgctgcgcgccgatcgcgttgccggccgtctgcgccagcagcgcggacagcaccgcgtcgggcgcgaacaccgtcggcgcgccggggtcgcccatgcacacgcagccgcgcacgaagccgatgggcgcggcatcaaaatcgtgctgcaccagcccgtcagccaccacgatgtcgccgacggcgaggccgcttgccagcccgcctgcgatgccggtgttgatgaccgcgccgggcgcgaaccggtcgatgagcacctgcgtgcagcgcgccgcgctgactttgccgatgccgcaccggacgagcacgacctcccgcgcgcccaggcggcccgtgcgaaagaccagcccctgtacggtctcctgcgcgggctgcgtgagcgccgcgatgagcgcggcgagctccgaatccatggcgccgatgacgccgatccggccataagccaagagaaacgctccttttcggcagcgcggccgcgccgcactgcggttttttcgtctaccttaatccttctgcccgccagtgtcaagccgccgctatgaaatttatgagttgctcataaatttgcggatatcttgtttctgccgtgtgacctgctatcatgaaggaagcttcaaaaatcacagcaggaggaatgcatcatgctcaacgaaaacgtcaaaaaactgctcaaggaaaacatgtgggacctggccacctgcagcgccggtgtgccgaatgcggtgccggtcgcgttcaaggacgtgacggacgacggcaagctcgtcgtcggtgacgtgttcctggacacgacgctgcgcaacctcgccgcgaatgacggccgcatcgccatcttcgtctacgacgccaagacgctcgaaggctatcagatccgcggcacggccgagcacgttgcggacgggccggtcgtggccacgttcaaggccatggtcgagcagatgttccagggtgcggctacggcgaagggcgcgctcatcatcacaccggagaccgtcgttgtcacgatgccgggcgcggagaacaaaaaggtcttgtaacggcaattttccatcgctttttgattcttctctttttgcccggggcgggacgcgggacgcggtgcgcgtttcgcgcccgtttctgcacacttgcattcggggcgaaactgcggtatgctgtaggcaacaaacggcggaaaggagccatttttatgcgcattgcagttccttatgaaaacggaaacatttttcagcactttggccgctcggaggcattcaagttctacgacgtggccgacggtgccgtcacggcggcggccgtcgtgtccacgaacggcagcggccacggcgcgctggcgggctttctcgtggcgaatcacgccgatgtggtcatctgcggcggcattggcggcggcgcgcagtcggcgctcaccgaggccggcatccggttttacggcggcgtgagcggcagcgcggacgcggcggtgcaggcgctgctcgacggctcgctcggctatgaccccgaggcgcgctgcgaccatcacgaccacgcgcacggcgcaggccacacctgcggcgagcacggctgcggcgaacacagctgccacagctgacgacaacggcaaaaaagcaagggctccgggaaaccggagcctttgtcgtttttggcggcacaaagaaaatttccaatttcccctgtcagcgccttgacattccgggcggaatatgctactttttgttgaccagatggtaaataaaaatctgggtacatattgattcgatcagggggaggaaataccatgacacagtctgtgaaagacgaagcaaaattcctggatacccgcctcgacgacgagaccgccgccgtactggaaaagtggaacctggtcatcctcggcgcagccctgctgcacgatgccgaccacatccgtcaggccatccgctggcgctataagatcccgatgcagctctggatcatcaacctggccgtgtacgttctgcctaccgtggcggagtttctgctgaaaaacaagcgcacgtcctcgttcctgaccgttgccgccaacggcatcgtcacgagcgcggcgtttttgaaggtgcacctgttcaagcccacgacggacatctggggcgcctggaactacaactacttcaagctcgccaggggcgtgtggcacgagggccagttcatcaagggcatcgactggatcgactgggcgctgctgctcgacctgcccgccgtggccatcccggcgtgcatgacggcgatcaaaaagcgcagggaattcaagcagaacctgctggaagcgggcgaagaggcctgatgatttttgagggggagcgccggctgcgcgttccccttttggcttgggggcgaagcaaatgaaagacatctcgctgaggattctggacatggagtgcgccgcgtgcgtggcgcggctggaccgcgcgctggaaaagctgccgggcgtgcagcgcgcggcggtgaactacaccgccgcgtcggcgctcatcacctatgacgagcgcgtgaccgatctcgccgcgatcgcggcgcgggtcaaacgcgcgggctttcgcgtgccggtcgcggagcaggatctgctcccggcggaagcggacgcggaaacggcagccgccgccgcggccgcgctgcgcgcggtgttcggcgtcaagggcgtggccgtgcaggcggacggcacgctcacggcgtacctgtggcccatcggcgtggacgggcgcgatctcgccgcggcctgcgcggtcgcgggctgcgccgtcacgcccggcgagctgcgcggcggcgacgcggatcaggagctggaaaagcgcatggatctgctcaagacgctcgtgacctcggcctgctgcacggcgccgctcatgctcgagatgcacccgaagctgcagtttctggccgggacggcgctgcagttcggccccgggcggtatttttacaagagcgcgtggcgcgggctgcgcaatcgcacgttcggcatggactttctcgtctcgctctcgtccacgctcatctatctctacagcgcttacgtgacgttcacgccgcgccgcagctacaagctctactttgcgtccgacggggtgctgctctcgctcatcctcttcggcaaatatatggagcaggtcgcggccggggaggccaactccgccatccgcaagctcatgcacctgcagccgcgcacggccatggtgcagcgcggggacacgtttgtcgagctgccggtcgaccagatcgcggaacacgacctggtgcgcatccgtcccggcgagcgcgtaccggtcgacggcacggtcgtcagcggtcagtgcgcggtcgacgagtccatgctcaccggcgagagcatgccggtggacaaagcgcccggcgacaaggtcatcggcggcagcctcaaccgctccggctcggccatcgtctcggccgaggcgctgggcaaggcgtccgtgctcgagcagatcatccagatcgtgcgccaggcccagtgcgaaaaagcacccgtgcagcgctttgccgacaaggtcgcgcactggttcgtgccgggcgtcatcggcgcggcggcgctgacgttcctcatctggtaccggcgcattgcgccgcgcaaccttgagcgcgcgctgctcacctgctgcgacgtgctgtcggtcgcgtgcccgtgcgcgctcggcctcgccacgccgacggggctcatggtcggctcgggccgcgcggcggagcacggcatcctcttcaagagcggcgcggagcttgaaaacgcttacaaggccgactgtgtcgtctttgacaagaccggcacgctcacgaacggcgcgcccgcgctcacggacgtctgcccgtgcagcggcgtgcggccggagccgctcgtgcggctcgccgccgcgctcgagcagtgctcggatcacccgctggcgcgtgccgtcacggcgtatgcgcagcagcagtccgacgcgccgctgccgccggtggaggacttttcctacgcgctcggccgcggcgtgcgcggcacggtcgcaggtgcggccgtcgtctgcggcagccggacgtggctccatgagctgggcatcgacacggctgcgcttgccgcgctgccggatctgcacgcgcaggccaagacggagctgtgcgtcacgcgctgcggcgtcgtgctcggcgcgctcggcatcgccgacacgcgcaagagcgaggcggccgccgtcgtcgcgcagctgcgcgcggcgggcaaggaggtctggatgatgacgggcgatcatgcccgcacggccgaggccatcgcggccgaagtcggcatcggccacgtgctttccgaggtgcggcccgacgagaaggccgccgccatcgagcgcctgcgcgcgcaggggaaaacggtctgcatggtcggcgacggcatcaacgacacgccggcgctcgccgtggcggactgcgcggtcgccatgggcggcgggtcggacatcgccatcgagtcggcgggcatcctgctgccgtccggcaatctggaaaagctgccggagctgtttgacatttcccgcgcgaccatccgcaccatccgccagaacctgacgtgggcgctgttttataacctcgtcagcatcccggtcgcggcgctcggcgtgctgcatccgtccatctgcgccacggccatgtcggccagctcgatcggcgtgctcatgcactcgctgcggctcaaggacagcgacaaaaaggagagacgtttcccatggaagaaaaagtcctgacgacgtatgtgcgcggcatctactgccgccagtgcccggagtggattgtggatgacctgctgcacacgcgcggcgtgctcgacgcggcggtgtcgttctggcgcgcggagctgaccgtgcgctatgacccgcagatcgtcaccgaggcggagctgcgccgcgtgctctctgactgcggctaccccgcctgcgaaaaaggcgcgccggggtcgaacccgctgcgcaacgcgctcaaaagtgccctcggccgcaggccggaggggtgaggggcacacctttttgcgcttgaccagtattgcggacagcttttgcggctgcttccgcataaaataaaagcgcttgcaaccaatattggtcagaaaatgctgtgcggtggtgagaagatggagcagaaattacggcgggatcgcgatcttggcgacaatttgcgccgcctgcgcaacgccagcggcctctcgcaggggaagctgtgcgccgagctgcagcgccgcggctgcgacatcggccgcacgacctacgccaaatacgaggcgggtgagctcaatgtgcgcgtgcgcgtgctgctcgcgctcaaatggctctacggctgtccgtatgacgccttcttcgcggggctggatacggcggacgatgccgaagcccgataacaaagcgccgccccggaagcagatcgcttccggggcggtgttttccgttacaggtagaatttcggctccttgcgcccggtgcagtattttttcaccgtggcggccgcggccagccgcagcggcagcggcacgccgcgggccgactgcgggcagatctggatgcagcgcagacaggagatgcacttatgcttgtccaccttctgcggcgcggccttcgggatcgcgccggcggggcagttgtccgcgcacaggccgcagcggatgcagcgcaggccgccggttggcttgagcggcaggccgttgtaggcgcggtagtccggatcgccgggcacggcgatctcggccggggcgtcggcggcgatgcgggccgcgagccgggtgcaaaaatctttgatcttgctgcggtcggacgtgtccggccggccggcggcgatgtccgtgttgaccgagtgcggcgcgatgacctccgccgccgcgatcacgcgaaagcccagcggggtgagcgtatcgcgcatttcgagcagagcgtcgtccacggcgcggttgccgaacacggccacgagcacggccggagtgtccgtcccgcgcagggcgcgcatgcgcgcgagacacggcccgggcacgcgcccgccatagaccgggaagaacacgagcaggcagtcgtcggcagaaaacgtcttcgcctcggcgtgcacggtgatgtcggtgcaggcgtcggccgcgttcagattttccgcgaagagcccggcgacgcgctgcgtgccgcccgtggggctgaagaaatacaggtgcaggttgcgcggatgcatggcatggcctcccaatttcagattgcctttattgtaacgaaaaatgcctgcgattgcaatgctttttggccaccggtcagtacagctgcagctcggacaggtaagcgtccagccgggacagccgctgctgcggatatacgccgagcgtgcggctgaactcgaaggcgatggcctcgatgagaaagttcacgccgatataggagtttgtgggcgaggggctggacagatcggcgagaagcacgatgtccgcatcgccggcgaagggcgcggtgagcttgtcggtgatgacgatcagtcggcagccggcgtcgtgcgccatctcggccagtacgcacgtcatgcgcgagtagcgctcggcaccgagcaggatcacacagtcgtgcgggccgtagtcgagcagcttttctacgcagcgggtgtctgcgtcgcagaaatactccacgtgccgggtatactgcgacagcagcgtccccaggtgccgcgccggccctgccagaccgcggaagccggagacaaagatgtgctcactctcgagcaggatgcgtacgatctgcccgtatttttccgggtcgttcttgcggtaagtctcctgcagacagtctacggcgaactgcaggcactgaaacgagctcaggtcctgatacttttgcaatttgtccggcacctgatgctgcgggatgacgtatttttcacgctcgatgacctgtgagagctcgctgcgcaggctctcctgcagctcacggaagccgcggtagcccagcgtgcggcacaggcggatgaccgaggtgtcgctcacgctgagcgcaagcgcgatgtccttggccgttaaaaaatatagcgagccgctgtgctcgagaaaataatccgcgatgactttttccgtccgcgtcaaatgcgcgctttgaatgcgctgttccagtttaccgctcatgggaacaccatccttttttctggggattgtgagcagtgccgcaacgaatgttgcagtagcaacaacattatactgtataaattgtagaaaatgcaatagtgcatgaaaaacattgaaaattcaattgacttttacgcataaaagagctaaaaataccgcatacaacaataccggtgttggattatttgagaggaggacctcacaatggagaaaaacaaacgtatgcaattttacgggggcacgctcggcgcgtgtgcgccgctgctggtcttcatgtgcctcatgatcgtgatcgccgcgatgaagaaagtgtccctggtgttgttctgcatggcaggtttcgccggactgtgtgtggcattcctgctggcaaaaaacaaaaaggaatttgaacaggcggtcgtggacggcctgaaaaacgacacgctgtgtgtcattatcttcgcgttcctgctggccggcatcctgtcgcaggagctgcgccagagcggcctcattcagggcctgacctggcttgtgatgaagctcggcctgagcgcgggcttcctgccgctggtggcgtttctcgtctgcctgctgatctcgacggcctgcggcacgtccaacggtgccatcgtcgccgtgctgccggtgctgctgcccgtcgcggcgaccgtcggtgcgaatccctccgtcgtggtcggcgccatcgtcagcggcgcgatcttcggcgataacctcgcccccatttccgacacgaccatcgcctccgcgctcacgcaggacgcggaagtgcgcgacgtcgtgcgcacccgtctgccgtattcgctgatcgccggcgtcatttccgccgtgctgttcatcatcgtcggtatcaagacgtccacgtccgtcacgctgccggacgtcatcgaccccgcctatgccaagacgctcgtcatgctcgtcatcccggtcatcatgatcatcctgatgctccgtggctggaacctcatcagcacgctcatcgtctgcgatctggtcggctttgtgctgtgcctggtgttcggtttcctcgacgtgccgacgctgttttcggccaccggccccatcggcgccggcctgaccggcatgctcaatgtcatctgcttcagcttcttcatgttcgcgctgctcgagatgctcaagcgcagcggcgtgtttgacatgctgctcgaaaagctcaacaacgccagcaagaccccgcgtcaggccgagctcgtcaccatcctgctgagcgtcatcggcagcgtggccatcggcgctgcgtccatctcgatcctgttcgtcggcccggtcgtgcgcaagctcctgcagacgcacaacatcgagcgcacccgcggctcgaacctcatggacggcattgcgaccggccttgccggcatcgtgccgtacaaccccgtcggcctcaacgccgtcagcctcgcgatcgcgagcggcgtcgtctcggagtcgttctcgtttttggattacgtgccatataacttccacagctggctgctgatcctgctgttcctgctcagtgcgatcaccggcatcggccgccactttgaaaagggcaccgccgccgcgcccgagaccccggctgcggaagagaaatgacgatttcgggtgcggccgccgcgccgcacccgctcagattgttacatttggaaggagaaaaccatgcaaaatctcaacgaaggtctgctgtttgatcctgcactgtcggcggagatcaaggatcgcttttactatgtggatgcggatccggaattcggccagcgcctgttctttgaaaattccggcggttcgctgcgcctgaaggcgtccgtcgaggcgcaggcaaagtaccaggcgttcccggactgcccggagcggctgcacgatcgttcccgcgcgctcaaaaaagtgcagctgcacggcatcgacgacattatgcacatcgttttcggcgcatcgggcggcgcgctcatctcggagatgactgcctcgcaggcgatgttccagatcgtcggcgccatcctggaaaactgccccggcaagagcgcggtcacgtccgtgctcgagcacccgtcggcgtatgacgcggtgaaatactactgcgacaagaccggcaaggaatttcgcgtcgcgcaggcgaacccgaagaccggcggcatcgacgtcgaggagatccgccgcatcgtctcgccggatacctgcctgctgagcatcatgtatgcctcgaacatcaccggcagcatcatggacatggccggtatcgtcaaggctgcgcgcgagatcaaccccgatatctacatcgtcaccgacgccgtgcagcacgcgccgcacgccgtgctcgacgtggacgccctcggcgtcgacggcgcgacgtttgcaccctataaattcttcggcacccgcggtatgggctacggctacgtgtccgatcgcgtggccaagctgccgcaccgcaaggtcttgcagcgcccggccgacgtctgggagctcggctcgcccacgcccggcaacttcgcggccatgagcgccgtggtggactatgtctgctggctcggcggccacttcatccagtcggacgaccgtcgcacgctgttcgtgaccggcatggagcacatccacctgcaggagcgcgcgctgctgcacaccatgctcgagggcacgcagaacgtgcccggtctgcgccacatccccggcgtacacgtgtatgttgacaccgaggatctcacgcaccgcgacctgatcgttgccatgggcatcgacgggctggacatgacccgctgcgtcgaggagtaccagaagcgcggcgtcacgacctttgagcgcgtcaacaccagcgtgtattccaagcgcatcgtcgaggccgtcggcctcacgggtgcgatccgcgtctcgccgctgcactgccacaccgtcgcggacatcgagacgtatctgcgcgtcactcaggagctcgcgcaggcatttgcaaagtgatcattctttcccctcccttcttttttccttatgcacagaccctgccgcatccgcggcagggtctgttgcagttttgccatgtgtgcggtatactggcggcagcaatatcggaagggggcggccgccatgcgcgaatccgcaacgaaaaaagtgctcgccgagagtctcaaggagctcatgctccggcgcgacttcgcggacatcaccgtgaccgatctgtgcgcggccgcggagatcaaccgccgcacgttctaccggcactttacggacaagtaccagctcgtgacgtggatctgcgacaagggctttcagaaggccatcggcgacgatgagccgggcctgtacgacctcttcgggcgcgtgtgcacgtatctgtacgccgaccgcgcgttttatgcccgcgcgctcacgttcacggggcagaattcgttccacgactttctctgcgcccggctgcggccgtacctgcaggcggacttttccgacctcttttccgatccgcagaacgaggcgttcatgtccgggaagatgtcggatgtggtcatggatattattcaaaactggctcagccggccggattgcccgccgccggaggtgtttgcgccctgggcgctgcacctgtggaaggatatcatgggccggtggaaggagctcggcgatgcgtgggagcacacattagaccacaaaaacgcataagtgaggcaaaaagccacgaaactgcggttccgtggctttccttgtggcgtaatttgttctatgctgaacataccccctcatttggaagcgtgcaggcccagaggtctcttttcgatctttcacggtacctcttctcccgttgcgcgacggtgtccgcgcgcttccgatctcgttctttcggcagagcatgccttccttttatatgaacgccccggactgcatttgcagtccggggcgtctgccgttgggggcgttctgcgcggggcgcgacgatttggaaagagaagccctgcacgatgatcgaatttcaatccgcgcaccccgtgtggggtgcgccgcccgggagccaccgcaccgatttcaatccacgcattccgtccgcgttgccgccgacaccggcacgctctctccgtcgaggcgcatctggataaaccacgtcccgcttgccagctttcgcggtttaggtactttcatcttgtagcctcctcagtccgggcgatacacgtctacgcgaccatcttcgatttcgccgtacaattccagcagctcgtcatagcagcgatacaggctttctattgcgtctttcgcgtcatcgtaggtgtagacgccctcgcccgccagatagctgtccagtatttccgcattcacgccgatgccactgcccggcccgtccaaaaggcaagctgcgtccgctttatttgccgcgtctacaccagcataaaacccgtcctcataatttcgcttgtaatcgtcctcgctgtagcatttgtcctgccagcacccgcacaaagtaagcgagagcagcacagcggccagcgacgcagcaatcccgcgtttccgcatttgcatatccccctttttgtatattcattcccgctcgttccacccgcgttacttttcaatgggtatggctttgttccacgggtacggattcggctccggaactttgtgatcgtgctggtagctttcaaatgttctgctgaaattataccgctctgcgtaacgcgcatacgtcgggtactggatgtaagtctcgatgcggtcggcgtagtcatcgactacggaatctgcatagcggagataggacgcggcctctatgacctggcgctgcgagacggaaaggctcttttgcgtgcactgcagatgatagcccatcaggcagcaggagacggccagcgcggcagacagcacggagagcgcaacgacggccgccttccttggcacccgttttcgctgtatttccggcgtggcattctgataattcacaacgcttccccctttttgcatattgttttccgcctgtgacacaataccgcaagcggcttgcaccatcaagatagcacagctttccgctttctgcaacaaaatccccgaaaacggaaattttccggccggaataccggccaaaaacgacacgcagccgcaaaaatgtggtaaggtagtgccaatatgcggaacaacatacgttgctatagattatacaagggcgtaagtcagcgctggcttgcgcagaaagtggggtgcagccatagcacactaggggtaatcgaacgcggagaaagcgtgcccaacgtataccttgcgatgcggatcgcgcgggcgctggacgcgacagtagaagaactatggagggagaaccatgacagatgagcaatggacggcgtacttacgggcggagatcgagcggctgctggatgaagcaagcgaacaaaagctgcggctgacgctggcactgctgcgcgcagcgtaaagaaaaacagaatagcaaagaaagaggagcaggaactcaatcctgctcctctttcttgttttccgcggtgatctgccgggcgaagtcttcaatatctttccaccgttcctccggcagccgtccggtgggggcgcgactgccagattgcagttggacacggtgacagtccatgtgtttcgatcctcgcgcccgcatgggcgcggcggggtcagcgcagggcgtccggcaggacggtgttctcaccgaccatgacccagttgcgcttgtcgcgcgcattctgattgtcaacccggtaccatgtaccggggaagaactggttgccgttgtttttggaagtgtcccaatcgtaggacatgaatgcataaaacggccggtcatatttggcgtttgcattgatggcgttgccggtgaaggggttcgtcgggttgtcgatcagcccgcttgtcgccagtgtcggcacgtcggccgtggtcatgaacgtgtccgagaacgagaagcccttggcattgaagtccttgaccatcagcagggggaagaaaaagtccgtatcggggccgttgtcgataacgcgatcccaattgaggtacaggccgcgtccgtgatctgcgacgaggatgatgcgcgtgttatcgtacacgccgttttcgcgcatatagtcgaaccatttgccgagctgcatcagcgaggccacgttggggtcatagtgcgcaaactggacatcctcctccatggtgatcgacttgccgtcaacggtgaaacggtccgcgtgcgttttgtcatactccgtgttatcaatggtgccggcaacggaataatccggctcctgcagcagcacgggggagtgcgtggtgtcgttggtcatgaacaggaacgtgttgtccccgctcttggtggtctgcgtgatcgtcgggagatgggtcagtgcatggtagcccttgaggaacgtggcgtccatgccggtggcggtgtgggggctggtgatcgtctgctcgacgaaattttcctcctcctccgtctgcacgctgctgcggttatagttgccgttgtcatagaggatggactgcgcagcgacggggcacaccttcatgagactgtaaccgaagaaattgcgcatattcgcgctgacccagtttttcgggctcatgtccgattcaaaggcgccgaaggtgatatagcggtgaatgtccgggtaatcggagaagacggacaggtcgggcacccactggtagttggcgtagatggggtcgaagaccgtgacgtcaaagtcgttctggtcaaacaggaccggcatcatcttgagcgcctcgttgtgcttgtcgaccagcttttcatctttgcgcaggttgatctggtcgaccgtgtattcgtatccacccatgagcgcgggcgtgcccatgttcgtgaaagcgccggtggagacgacgttcgtataagcggtgaagccgtcgaactgtgcctggagctccggtttttcgttgaaaatatacggcaggaatgcgcccacggcgcggtcgagcatgagcacgatgacgtttttgccggtcttgctcatggtgtattccggcacaccgccgctctcttccatcgtctggcggatgctcttgatctgcgagtggatgctgccgatattgatcggcagcatgatggcaatggccagaacgaacgcgagcgctgccttgaatacatgcttgctccaccgtcgatagaccagatacatgacaccggcggtggccgcgattgcgagcaggttgccccagagctcggccggcgcaaactgcatgccgccctcaaagctgagcgtggacgagagcacaccgaggtacttgccgaagaacatgaaatccacgatggcgacgccgacgagcatccacaaaaccttctcaaaggcgaccttgcccttcgggctggccagccagtagaagatgccgaaccagatgacaaaggtgccgatggcgaggcacaggctgttgatgacgaaccagatcgggctgtagtacatctgcacgttgacaaattcctgcgcggacgacgagatgacggacgccgggatatacccgccgatgaacagcgccaggaacgcggcgcagccaaagaagatctttgcgttcggcttggtggcgggcttgccggcggcgggcttcttcgtgcggatcagccccacgatcaggggcagcatcagcgccgcgcccagaagcagcagcgcggctttgacgaccggccgctcggagaaggaatagcgcacgagaccgagcgccagcagcgccgcaccggcgacggcggccaggatcttgagcacccgccccggatgcttgagcttgtagaagatggtcttgatgagggagaagatgttgttgagcgtccagtaaaacaccagaccggcgggggaggtgtacaggaaaaacaggaagaacaccgccatcacgtacagctggatcttcgtcttgggcgttgcgcccttcgtgaagatgatgcacgagacgaggttgaccgccgtcatgatgatgggcaggaggttgatgtgcacgccggcgatggcgatcagcccgtcggcggcgccgaggtcggcgatcggcccgaaggacacgcccttgatgagctccagcccggacaggaagcggtaggcggcgatgaaaaacggaatctccagaaatagcgacaccgcactgcgcagaacatacgtgggcttatagtggttctggcggtagtaggtctgcaggatcatcatcttctcgtcgccgcggaacgtctttttgatgtgcgtcacgccgcggtgcaggcgggcctccatgtcgcgctcctcttcctgcagcgcgtcggcccgcatgtacagcggcagcaccagaaagttcatgaccaggctcagcacgatgatggacaggccggggttgccgatcacgcggttggcgttgacatagacgacctcaaacaaaagctgcagcggctgcagcagcagggaatccagtatctgaaaaaatgtcacggttctttctcctcatgcgttgcggtaagttccttcaccttctgctcgagatagtccgcggcgcgcacggcgccctcgcccggatagacccaggtctgcgctcttgccgcgtcgcggccctgggcgtatttcgggtcggtcaggcactgctgcaccatgtcgccgagcgtgtcgaagttgtcctcggtgagctgctggccgatctgcggcaggatctcgaacgtccagtacggcgtgtcgagccaccagcagtcgtaggggctcttgtcgaacttcgtgtccgcgtagatgacgggcttgtcaaagaccagcgtgaaatcgaagatgacgccggagaaatcggagacaagcaggtcggcgcgccggagcacgtcgaagttatcgttgtcgcggttccactccagatcctccgagtccgggtaggcggccatgagcttgtcgatcatgtccttttccgacttgtacgactgggggtgcgggcgaatgatgacatggtagccgccggcgagcagcttgtcgatgatctttccgccgtatttgctgaagatcgcgctcggcccccaggacggcgcgatgagcaccgtcgtcctgtgcggcgcgatggggccggcggcgtccagccgccgcttcatctcgtccatgtaggggatgccgatcttcacgacctccttggcgggcaggccgcgcagcgcctcgagcgcgcgcaggtcgcggatctgatagtcgccggagacgaagactgtgtcgtaatagtcgatgccgaacatccggtagccggcgacctcgttggccgcgtgcaggatgtgcacatagcagtccacgcccggcgagcgcttccactggtagacgtccagccccggcgtggtggacagcagtacgttcgcgcgcaggaagttgagcttggcaaaggccttgttgccctcgccgagaaactccgcgtgcacgtgcgcgtaggggttttgcagcgccggatcgtcgggcgacgccgtcagatacgcgacgtccagcccgcgccggtccagctcgcggcacacgggctccatcacgttccagtagcgcttgtcgtccacgaagacggccagcgggtgcttttcctggtcgacggcggtcttttccccgccgctcaggagaaagcgcagcttgatgatccagccccgcagcgcaaagttcagcgcgccgatgatgccgatcagaatggcaaagagcatgctgcccgtgccgggatcaatgtacagtttcatgttttccgttctcctctgcccgtagcatccacagcccggcgagcacgctgcaggcggcacagaacccggacacgagcagcccggcgccgcgaaggtcatcggcggggaaaagtccgccgaagagattgatgagcgcatggatgcccagcgccggcacgatggagcggtaataggcgaccgtcccgcacagggcgaagcccgtgcaggcggcgcacaccgcctgtatgccgacggcgcccggtgggcctccgatgagattgacggcgtggaacacgccgaacacggccgcgttgagcacggccgccgtcagcggccgcagccgctgcgtatgttcccacagatacccgcggaaagccagctcctccgccatgccgcacacgacgtacatcccgcaggcgaaaaacccgtccgcggcggcgctgcggccgcaggcggccagcaccagatcgccggccggccagagcagcagcaacagcagccccggccaccgcttccgcccccggcggcaggcgccgagaccgtatctgcgccggtaaaggatcagcgccgccgcgagaaagaccgccagccccgcgaaggtgacgctgtgcggcaggccgatcctgcgggaaacgaactcgcccagtgtgtagatcagggcatatatcagcaccaggtagaccatagaaagcaaacgcatcctttacaacattttttcattatataatgtcgaaatccgaaacacaagggaatctgcacatatttccgacatggtttttaaatgcgcttgacaaatccggggaataagttcataatgcgcattgcatatcaagaaaatgaacgcaagggagtctgacgatcttgttgacaaaaaatcagtttgcgctgctcagctacattgccgcccgtcccgcgggcgagccggcgctttcgcagcgcgccatcgcgcagggcaccggcaaagcgctcggcaccgtgaacgggatggtcaaggagctgagcgccatgggctgtctcgacggggcaaaccgcatcacggatgcggggcttgcggcgctcgcgccgtaccgggtggacaacgccgtcattatggcggcgggcatgagctcgcgctttgcccccctgtcgtatgaaaagccgaaggccctgctgaaggtgaagggcgaggtgctcatcgagcgcgagatccgccagctgcaggcggcgggcatcgacgacatcacggtcgtggtcggctatatgaaggaaaagctgttttacctcgaggaccgcttccatgtgaagatcgtcatcaacgaggattaccaccgctacaacaacccctccacgctcatgctcgtccgcgaccggctgaaaaacaccttcatctgctcctcggacaactactttgagcaaaacccgtttgagccctatgtgtatcaggcgtattacgcgtcgctctacagcgcaggcaaaacggacgagtactgcatggtcacgaaccgcaagggccgcatcacgggcgtgcaggtcggcgggagcgacgcatggtacatgttcggccacgtctatttcgaccgcagcttcagcgagaagttcacgcagatcctcgagcgggagtatgacagcccggtcacccgggcggggctctgggaggatctgtacgcccggcacatcagcgagctggagatgtacatccgcaaatatcccggcggcatccatgagttcgactcgctcgatgagctgcgggcgtttgacagcgcctatgtcaccaataccgactcgtatattttcgacaacatctgcgccgtgctccactgcacaccggacagcatccacggcatcatcccgatcaagacggggctgacgaacctgtcgttcaagttcacgtgcaacggccgggactacgtgtaccgccaccccggtgcgggcacggaggcttacatcgaccgcccggccgaggcgcgggcgctggaggtggccaaggcgctggggctcgacgacacgtttctctacatcgacgcggccaagggctggaagatctcgcactatatcgaggacgcggccattctggactatcacaacaccgagcaggtcgacacggcgctgcgtatgctgcgccgcctgcacacgagcggcatacagctcgacggccggtttgacatctgggagaagatcaacggctttctcgacctgctgcaggggacggacgtctccgactttaccggcatgcaggagctgcacgagacgatgtgcgcgctgcacgagcgcctgaagggtgacgcggtccccctgtgcgcctgccactgcgacagctataacccaaacttcctgatcgacaagcaggggaagatgtacctgatcgactgggaatatgccggcatggccgaccctggctgcgacatcggcacatttatcgcctgctcggactacacgcccgaggaggcggagcaggtgatcgcacgctatctcggccacgcgcctacgggggcggagctgcgccactacatcggctatgtggccatggcgtcctacttctggtttttgtgggggctgtatcaggaggcgtgcgccaagcacgtcggcgagtatctctacatctggtataaatacacaaagcaatacgcccggctgacgctggagcgatatgaccatgaggaggagtttgcttgaagcagaagacagaggcccagcagggctcgattgaacagctcatctacgaggagaccgagcggcggctggagatcatgcagtccgacacctacgagttccccaagaaaatgacccgggtcgattacggcatcatcatcgccagcgtggcggccagtctggtgctgatcgtgacctgcatgctgggaggctgaaccatgacagacagagaaagctatatccggcaggagaccgttacgggcgttgtgcccatgctcaagggcgaccggcagtattccttcctggatctgtttttgtccacgagcggctttgccattgccacgtggtgctatacgcagggcgcctatgtcgcgcagtacctctccttcagcagaatgctcatcaacattttctgcttcaacatcgtctgggtgttcatcgagtgcctgcccgtcatctttgccacgcgctacggcattgatctgtggatctggctgcgctcggtgctggggcggcgcggcgtggctgtgctgtccacgatcatcagcgtggcaaactttggctggtacgcggtcgcggcgagcctgttttcctcgtcgatgatcaaccttgcggcgaagttcggcctcgtgctcaacgcggccgtctggagtccggtactgggctgcctgtgcgtcgtgctcggcacgctcatcgcgctcggcgggccgaatgtcatcaagtggaccaaccgctttctggtcacggcgctgctggcggtcggcgtggtcgtcgtcgtgctgtgcttcacggccgtgccgctgcgtgagatcgtggcggtcaagccggtgctggacgcggacatgacgccgctgcaggcgttcatgatctcggccgagggcaacgtggcgttcgcgttctcgtggtcaacgcaggcgctggtcctgccgcgactggccaagaccgagcgcggtggctactggggcacaacgctggcctacggcgtggtcgcgccgtttttcgtcgccgccggcggcgtgatggcgctggcgatgttcgtgcgcaccggcgtgtacgagagcgatcctaccaatatgctctcctacctctgcggctccggcttcgcgctgctgagcctgctgctggtcgcgtttgcgaatgtcggcacgcagggtaccggctcctatgtcaactgcatgatcgtcaagagcggcatgcccaaggtcagctataaggtgctggtgctcatcgccatggtgtatgtcagcgcgctgaccgtctggggcggcgtggaagagcacttcggcgcgttcatctccattgccgcgttcattcaggcgccgatcatcggcatgatcgtcgtggactatctcgtcgtgaaaaagcggaagctgtcgctcaaggcggcctacttcatcgaggggcacgatgcgtaccggttcaccggcgggttcaacctggtcggcatcggctgcgtcatcctctcgtgcctgatcacgatcctgttcgtgtacaatccgctgaccggcagcatccagagcccgctgtttctcatcttcacgggcagcggcttcgatgccatatgcggcggcctgctctactggctcgccagcctgaccccgctgaaaaagtacatgctccgcgaccgcgacgatctcgagatcgtctgaggcggcccgagcgatccgaaaacgtccccggtgcagatgcgctctgctccggggacgttttgcgccgcggcagacattttttgaagaaaaaactggaacgcccgtgagcggcacggactgcatagactaccggattttgcagaaaatagggttgccgaaacgcaaaacagagcaaaggagttttccgaatatgaaggcaaccggaatcgtgcgccggatcgacgacctcggccgcgtggtcatccccaaggagatccgccgcaccatgcgtatccgcgagggcgacccgttggagatctacaccgacaccgacgggcaggtcattttcaaaaagtattcccccatgggcgagctgtccgagttcgccgcgcagatctgcgacgcgctgcacaagaccaccggcagcatcgccgtcgtgtgcgaccgcgacgcggtcatcgccgtggccggcggcggcaagcgcgagctgctcgaccggcgcatcagccgcgagcttgaagagctcatgagcacgcgcgggcagtatgcggccgacagctgcacgctgccggtcgtcgacaccgacgagcgctacgccgtcgccgtcgccgcgcccatcctctccgagggcgacgtgctcggctgcgtgctgttcgtggccgcgcacggcgacggccccgccggcgagacggagcgcaagctcgcgcaggctgtgtcgggcttcctcggcaagcagatggagagctgagcgcgcggagcagaaaaaagcgtcagagcgtatgcgcgccctgacgcttttttgatatggaatgaaaaaggcccccgggcgcccccggaggcctttcgctgcacgcgcagccgatatggacacgtgccccgtacgctgcaggcccgcgtcgcgatcactgtgacgggatgagatatgccatgcggcggagaacaaaaagggtagataatccgtaaagagagatcagataaaaagagaaaagaatggataaaagagatggggtggggtgcgaaatggataaaaaaccgtgcgtacgcagacatcccgacatcaccaatgatacaaacagtttagcccagcagtacccgaaagtcaagcaaaatcaccgaatttttgaaaattcagggattgtcaggaaattcacgcgcccggtaaatttctggcaaggggaaaaaccgttgaactccgtcggaatgtgatgtacaataaaagcagaacatcagcaggcaaaagggggtacggtgcatgaccgtattggtgaccggcggcatgggctacatcggcagccacacgtgcgtggagctgcttgagcagggcatggatgtcgtcgtggtggacaatctcgtcaacagcagcgcggaggcgggaagacgggtcgaacagatcacgggccggccgctgaaattttatcagatggacgtgcgcgaccgcgccggactcgaccgcatttttaccgagcagaagatcgactgcgtcattcatttcgcgggcctcaaggccgtgggcgagtcggtgcagatgccgctggaatactacgacaacaacctcggctcgacgatcacgctctgcgaggcgatgcgtgaccacggcgtccggcagatcattttctcctcgtcggcgacggtgtactccggcgacaacgagatgccgctctacgagacgtcccgcaccggcaactgcacgaatccctatggctggacgaagtacgtctgcgagcagatcctgcgcgactatgttgtggccgacccgagctggtcggtcgtgctgctgcgctacttcaaccccatcggcgcgcacccgagcggcctcatcggcgaggacccgcgcggcgtgccgaacaatctcatgccctatatctcgcagacggccattggccggctgaagtgcctgagcgtctttggcgacgactatgacacgccggacggcacgggcgtgcgcgactatatccacgtcatggatctcgcgcgcggtcacgtcgcggcgatcgcctacatggcggagcacacgggcgagagtatcttcaacctcggcaccggcaagggctacagcgtgctcgagatggtgcacgccttcgagacggccaaccacgtgcatgtgccgtaccggatcgcgccgcgccgcgcgggcgacctgccgaccgtgtacgcctgcccggacaagagtgcgcgcatcctcggctggcacgccgagtattcgctcgaggacatgtgccgcgacagctggcattggcagacgcaaaaccccaacggctacgaaactgcctgacggaccaccgttcccgggccggagcttccggcccgggcagcgctgcgccgcctgcgggcggtgcttttttgcggcctgaagaggccgcgctgttcacataatgtgcaacaaaaatcgaattgcttattgacagcctgtactagatgttgtacgatatacccgctctcaatacaaaataaagcggttttccgcacaagatattgtgttttcgattacgagggggaggaacagaaagatgaagatcatcaagcgaaacggcgcagaggagaactttgacatctccaagatcatcatggccgtcacgaaggccaatgccgccgtcgaagagtgcgaccgcatgacgccgcggcagatccagcgcatcgccgagagcgtggagctcgcctgccaggagctgggccgcagcgccgccgtggaggaaattcaggacatggtcgaaaagcagatcatggcccacggtgcgttcgaggtcgccaaggcctacattacttaccgctacacccgcagcctggtgcgccgcgccaacacgaccgacgaccgcatcctgagcctcatcgagtgcaacaacgaagaggccaagcaggaaaactccaacaagaatccgatcgtcaacagcacgcagcgcgactacatggccggcgaggtcagccgtgacatcacgagccgcctcctgctgccgaaggacattgtcgaggcgcacgaggagggtatcatccacttccacgacgcggactattacgcgcagcacatgcacaactgcgacctcgtgaacctggaagatatgctcgaaaacggcacggtcatcaccggcacgctcatcgagcggccgcacagcttctcgaccgcgtgcaacattgcgacccagatcatcgcgcaggtcgcctccaaccagtacggcgggcagtcgatctcgctgacgcatctggccccgttcgtgcaggtcagccgcgagcgcatccgccgcgaggtcgaggccgaaatgcaggccatcgacgcgcatccgggtgaggaaaagctggccgagctcgtcgaaaaccgcgtgcgcgaggagatccgccgcggcgtgcagacgatccagtatcaggtcgtcacgctgctgaccacgaacggccaggccccgttcgtgacggtgttcatgtatctcggagaggcgaaaaacgagcaggagcgccatgacctcgccatgatcatcgaggagacgctgcgccagcgctatcagggcgtgaaaaacgagaagggcgtgtgggtcacgccggcgttcccgaagctcatttacgtgctcgaggaggacaacatccacgaggattccccctactggtatctcacggagctggccgcccgctgcaccgccaagcgcatggtgccggactacatctccgagaagaagatgctcgagctcaaggtcgacaaaaacggcgagggccactgctacacctgcatgggctgccgcagcttcctgacgccgtatgtcgacgaaaacggaaagccgaagtactacggccgcttcaatcagggcgtcgtgaccatcaacctgccggatgtggcgctgtcctccggcggcaacatggagaagttctggaagatctttgacgagcggctcgagctctgccaccgcgcgctcatgtgccgccacgagcggctcaagggcacgctctcggacgccgcgcccatcctgtggcagtacggcgcgctggcccgtctgaagaagggcgagccgatcgacaagctcctctacggcggctactcgaccatctccctcggctacgcgggactgtatgagtgcgtcaagtacatgaccggcaagtctcacaccgacccctcggccacgccgttcgcgctcgagatcatgcagcacatgaacgacgcctgcgccaagtggaagcagatgcacaacatcgacttcagcctctacggcacgccgctggagtccacgacgtacaagttcgccaagtgcctgcaaaagcgcttcggcatcatccccggcgtcacggacaagggctacatcaccaacagctaccacatccatgtgaccgagcatatcgacgcattcagcaagctggccttcgagtcgaagtttcaggcgctctcgcccggcggcgcgatcagctacgtcgaggtgccgaatatgcaaaacaacatcccggctgtgctcgaggtcatgaagttcatctatgacaacatcatgtacgccgagctcaacaccaagagcgactactgccaggtctgcggctacgacggcgagatcgagatcgtcgagcacgacggcaagctcatctggcgctgcccgaactgcggcaacacggatcaggacaagatgaacgtggcccgccgcacctgcggctacatcggcacccagttctggaatcagggccgcacgcaggagatcaaggagcgcgtgctgcatctgtaacgtgcaaaaatgaaaaccggcgggcgtgtccatgcgatacgtccgccgtttgtgaggaaactgctatgtattatggagagatcaagacctgcgacattgccaacggcgtcggcgtgcgcgtgacgctgttcgtttccggctgcacgaaccactgctacaactgctttcagccgcagacgtgggattttcactacggcaagccgtttgacgcggcggccgagcaggtgatttttgccgagctggaaaagccctttatccgcggcctgacgctgctcggcggcgacccgttcgagccggaaaaccagcgcgcgctcgtgccgtttctgcgccgggtgcgcgcgcagtatccggacaaggacatctgggcgtattcgggcttcacgctcgacaaggagcttacggtcgacggcacgcacccgcgctgcgaggtcacggacgagatgctttcgctcatcgacatcctcgtcgacgggcgctacgtggacgcgcagcgcaacatcagcctgcgtttccgcggctcggaaaaccagcgcatcatcgacatggaccggacccgcgcggcgggccgcatcgtactctgggagggcatgaacggatggaagtgaagatccagaagctgcggcccggcgctgtgacgccgcggcgcggcagcgcggacgcggcgggctatgatctctatgcctgcccggcggacgggcagtgtgtcacgatcgcgccgcacgtgacggccatgatcggcacgggcctcgccctcgccatcccggcggggtatttcggcggcgtgttcgcgcgcagcgggctggcctctaagcaggggctgcgcccggccaactgcgtcggcgtgatcgacgccgattaccgcggcgagtgcaccgtcgcgctgcacaacgacacggacgaagtgcgcaccgtcgcccccggcgaccgcatcgcccaactcgtgatcctgccgtttctggcggcggagtttgcagaggcggatgcgctcgacgagaccgaccgcggcgcgggcggcttcggcagcaccggccggtaaagcaacaaaaaacgcagcccccttcgagcgtctcgaagggggctgcgttttgctttattcagcggcaaacttgctttattcagcggcaaacttgctttattcagcggcaaacttgctttattcagcggcaaacttgctttattcagcggcaaacttgctttattcagcggcagtctgcgaatacgggcgagaattcgtcgagcttctcgcacgtgtagcgccgggtattgtcctcgcacacgggcagcatttgctgcgtgaatgcggcgcagcgcgtccattcgtcggtgacggcctgactgtgcgcggtgttcaggtcatagtgctgcgcgagatagtcggcgaggtagggcgtgaatttctccgcgccgaaaatgttcagatgctcggcgttggcgaaatcattgagcgggtcgaggccgatggcgtccatctgcgtgtcgaagttcgcaaaatcatacccgtactcgtgcacgaccgcctccagctcggcaaacacggcgtcatagttttcaatgacggtgcggtgcgggaagcgggcaaagagcacgtttttgattccccgtgccttggctgtctcgcagaaggtgcgcaggctctgctcgttgaaatcgtcgagcgattgctggcgcacggggatctcatccgtctccgtgaggaacatggagatggacagaaacggcttggtgtacgaatagcccgcgtcgcgcgcctgctgctgcagtgacagcgaattgcggatgaggtccggctttctccagttgtcgtggtacttgagcagcggcacatagtatgacagccggtcgccctgcacgcactcgtcaatggcctgcaccttgttgcgtgagagcggcagcgtgtcgagccattcgcgcgttgcggccgtgccgagctcatcccgctctgcctccgtgtagagaaagccgttgacctcgaccacgtagacagacggattttgccgcttggcgctctcgcgcagcatggatgcatagagcgtgccctgcgcggccgacacggccagcgggtaacttgtaaacccggcgtgctgccatgccaaaggtgcgcaatagtcggtaaacgtctcactcgcgccgaggatcatgacgtcgagcgagtttttcggctctagatagaagctgcggatgtactgctgctcggtgatgctgttgatggtcagcagccgcgtgagcgcgccgtagaccagcgccacgatgagcagaaacgcgattacgcgcaggacggtatttctttttgcgtgttgttttggattcattgatgttctccacatgctgtgttagcgccacgcggaaaattgcggcgatggtctgctgcgagcccgcttcgcgggcttgggatagcgggcgctgtttcccggcttaaaactgcatatacacgaattcggatgcctgcacgccggggccgtaaacgcccatgagcacgacggcgaagatgccggcaagcagcacggcccagcgcagggcgagacacttctcgtcgaggatctcgcggatggtgcgctgcgagcgctcctgaatgacggaggcggtgaaaatcacgaccgtgccgaacagcagcacgcaccaatcataccgcgtcagaggcagcgcctcgagcacggcgcccggccgcagctgcgacaggtgcaggtcggtcacggattttaacatcatgcccatcgcggcgcgaaaaccgtcggcgatgtcaaagtaatagccgatgagcacgaccacgaacgtgcgcagcatggaaaacacctgataccacgcgctcttgcgctcaatgtgcagcgcggcgacgaccttgtccgacaccggctgcagcagcgttgacacgaggatgaccatgccgttccagaaaccgaaggcgacgtatttccagcttgccccgtgccagatgccgatgatgagaaacgtaatcagcgaggccacggccgtcggcagtaccttgccgatgtggctgccgaggtgctgtctggcgtggcggccccaattgagaaacgctttcgagatcgacagcgggtagaacaggtagttgcgcagccagtcgccgagcgagatgtgccagcggtgccagtactcggtgagcgtgcgcgagaaatacgggcggcggaagttttcgcccatggtgatgccgaacatctgcgccacgccgcgcgagatgtcgatgccgccggagaagtcggcatagagctgcagcgcgtagacgatcgccgccagcagcacgtacgtgccggcgtagtcggtgtacgccccggcgacggtgtggatcatgcccacggcgcggtcggcgatgacgagctttttaaaaaagccccagaggatcagctgtgcgccgaagcggatgttgtcaaagctgtatctgtgctcggcatagagctggtgcgccagctggtcgtacacgccgatcgggccctgaatgatctgcgggaagaaggacacgaacagcgcgagcttgccgacgttgcgctcggcgggcactttttcacggtagacgtcgagcacgtagcccatggactggaacgtgtaaaacgagatgcccagcggcagcagcagcccgatgtggccgagcgagaccgtcagccccacggacgcaaagagcgtctccatggactcggcaaagaagttatagtatttgagcacggcgaggatgccgaagttcagcagcaggatggcgatcatgagcgccttgcggcgggacttgcagcgctttttgtacgccttgcgctcctcgcgctcccagtcctgcttgtgcgcggcgacggtctgctccatgtgcgcggtcatggcgtccatgccgcgggcgccgaagtaggtcgtgagcgttgtgatgacgataaagcccatgtagcgcaggcacacgaacgcgtaaaacgcgtagctgccgatcagcagcaccacccactggaaccgcttcggcacgaggtagtacagcaccagcagcgcgagtaccagcaggtaaaacgacagcgatgtcagcgtcatgcttcgtcctccggcgtccggcaggtgttgagcgcgtcggtcgcaaaccggtcgcgcacgagcgtgaagttcccaccgcggtacagcgcgacgcgcggcatgtcgcgcgacagaaacacggccacgccctccgtcacggagtacgcgccgcagcggccgagggcgatcacgtcgcccacgcgcagcggcggcagctgcgcctcgcgcacgagcacgtccgccgtcgtgcacaggctgccgcagagcatccacggctcgggcgcgtccgcgctctcgcgcaggagcgtcagcggcggggcctgcatgcccatgagctggccgtcatacttgacctggtgcatgccgccatcgcatatggcgtagttcacgccgaggttgcacttggcgtcggccacgccggtgagaaacgtgccgcagggcgcggcgaaaaagcggcccatctcgatcgtgagcggatacttctcgccgaaggcgcggatgtgcgccgccgccgcgccgagcagcgcgcagtcgcgcgcctcggcgtcgtcgcggaagcactcggcattcagccccgggccgtattccacgtgctgcgccgtgaagccgtagcgttcgtgcagcatcgtgaggtattcgtccagatgcgcaagctccttggcgatcacggcgtccttgcgcttttgcgtgccggaaaagtagtggatgccgacgatcgtcacgttcgggaattccgcgcgccgggcgacgagatcggccagcgcgtcgggatccatgccgaactggctgccggcggtcaggcgcggcagcacgcgcacgtgctttccctgcgcggccgcggccgcgcagataaggtcaaagtgcagcgtgctctcggccgtgagcaggtctgcgcccagcgcgacggcgcgcgcaacatcgtccgcgcccttgttcacgccggagtacaggatgcgctccggcgggatgccgagcctttcgcagatcgtcagctcgccgggggagcacacctccacccagcggaacacgtccggcaggccgcgcagcacgaaggggttggccttcatggagtagcacagatttacgtccgagccaaacgcggcgcgcactctttgagcgcgcgccgtgaaggcctccagatcaaacagatacagcggcgtgccgtatttcgcggctgccgtccggagtgcagtcttgtccatcagtcctcgtcctgcaggcgctgcaccatggctagcagacttttcgcggagttgaagttctccggcacgaggtccttggcgccgatctcgatgtcgaatgcgtcgttgagcgccgcgacgagcgacacgatgtcgaacgactcgagaatgtggtcgtcgatgagggcggtctcggtctcaaaatccacgtcgggacgcagatcggtcagaatgtccatcagttcctgttccatagtaatatacctcctgaagtgagtaaagtaagcaaaatcagtgcttggccgcagcggtgatgcgctcggccagcgcgcgcatgttcgtcttgccgttgtcgagccggggcatggcgtccagctgctcgatcttgcgcggcaccatgaagcccggcaggtcggcgcgcagggcgacggcgatgtcgcgcttggtcacgccctcgccggtgtaaaacagccagatctgctcgtgcgtctggtcgtagagcgcgcaggcgtcctccacgccggccaccttcgccgcggcgaggtcgatctccccgagctccacgcggtggccgaggtgcttgacctgccggtccttgcggccgtggaacatgaggttgccgtcgggcgcgaagtgcccgaggtcgccggtcttatagatgcgctcatcgtatgcgtggttgagcgggttttgcaggaagctctcggccgttttctcgcggctgttgtagtagcccagtgcgaggatggggcccttgacgcagatctcgccgatctcgccgtcgggcacggcctcgttgcgctccgagagcagaaacacctcatagtgcgggtacggcctgccgatcggcagcacgtcggtgtcctcgaccagaccgggcacgacgtaatacgtgcacgaggcggttgcctccgtcgggccgtactggttgacgaaccgggcctccggcagcgcgagctgccactggcgcaggcagctgcacggcatcaccgagccggagaagcacaccttgcgcaggtgttgcggcgcgctgcactcgaacgcgccgagcgcggccggcacggtcagcgccgagacgctccagcccacggccgtgacgcccttgtcgttcatgtattcgaacagacgctccggcgacatgaaaagttccttcgggatgatggccgtcgtcgcgccgaagcgcagcggcagataaatgtcgcgcacggcggcgatgtagtccagcggcgactggttgcccagcacgtcggcacgcgcgatgcccatcacgccggcgtagtcctcgatgtagcacatgagcgagtgctgcgccgtgatgacacccttgggcgtgccggtcgagccggaggtgaagatgatgtacagcgggtcgagctctcggacgcgcgcgcggcagtccgcgagcagcgccgcatcctcgctgcccgcgagcagctcctccgcgatcaggatcgtgccggaaaagtccagcgtcttcgccttgtcgtaaaacgcgcgctgcacgatcatcagatcggtgtccagcgtttttaaaatagagttgagccggtgcacgggcattgtcccgtccatcggggcgtagcagcacccggcatacaccgcgccgagaaacaccgccggcgtgtgtgcgttgcgcccgctcatgacggcgatgggccgcttttgcccggcgcggaacttcgccgccgccgtgccgatgatgcgcgcctcgcgccgcacgtcggcaaaggtcaccgcactgtcctcatcgagaaaagcgggtttgtccggacaggctgcggcggtggtttccagccagtcgagcacgttggtttccatgcttgccagctcctttccgataaatgtccataatcgccttatcctatcatgtttttcgcgcaaaaacaagacggaacgtgtcatatttaagaaaaaggtaagaatgtggcgcgccgtttttccgcgcgctgacacccggttctgcccgggcggtttgcccttgacgcatccgtaccggaaaagtacaatggaaaccatcatcaatcggcgcttcgcagcacgacgcaatgggcgcgcccgcggcatattcgcagccggatttgtctgctattgccaaaaacgcgcctggaaaattgtgaacatttttcctttcgcatttatggcgcatatggtacactttaggaaaccgcgcaaaaaattccgtatgtggttccgacgtattttgcgtctgtcgtgtgctatgatcgttcctgtttccggtttccggacacgggccggtgtctccgcggaaaggagggggagtgcagcggggcggaaaggaaggtcacagatgtcaaagagagttcaaaaggtgtggaacgctgtcaccaccgtgctggtgatcctggttgtcattctggcgctgcttctggtgggcgtgcggctggtcggtctgcggccgatgtgcgtcctgtccggcagcatggagccgacgtatcacaccggctcgctgatctatgtcaagccctgtgcgcccgaggacgtgcaggtcggcgacgcgatcacctttgtgctcaatgaggacttggatgtcgtcacacaccgcgtgatctccatcgatgcggaaaacgagcatttctacacgcagggagacgcgaacgacgcacccgacggcgcacctgtctatttcaagaacctcatcggccgcccggtgttcaccatcccgtatctgggctatgtttcgcactgggtgtcgaacccacccggcatgtatctggccatcgcgctcgcgctcgtgctcatcatcctgacgttcctgccggacatgctccgcaaagcgtcggaggcggacgcgcgcgacgctgcccgccgtgcacaggcggacaagcccggcgatgcctcggatgccaaaaatcccggcgaaaatatggaaaaataaagcttccgtgcaatattttcgccagtttgtgcattaacttagtgattgctggcagcacccggcacggtgctgttggacataggaagctttgaacaaaatttaggggaggaaaacgttacatgaagaagaaaactctgaccgtcgccatcgcgctcgtgctcgtcgtggcgctggcggttggcgcgacgtatgcgtatctgacggcgaagaccgagacggttaccaatacctttacggttggcaagacaattgatgatccggaaaccaacttcatcctgaaggaacacaaagttgcctatgatgccaatacggctacttataagtatgtcgacgccgaaggcaatgtcactactgacagttccaagtatgttgaagtcgctggcaatgagtacaatgaagtcacaccgggcatgaccgttgcgaaagatccgttcgttcagattaagaaggctgttgagactccgtcttatctgttcgtggaagtctacggcaatgctgctggcctgaattacaagctgaacggcgactgggaggaagttactggccttcagaagcagcttccgaatggcggtacgctttatgtttataagactccgatgacttctggcaattccattggtacctatccgattctggatggaaaccagcttgccgttgatttgaccactccgcttgctcagaattccagcctgcaattcaatgcttatctgtgccagactaccggcttcagcagcgcagctgctgcgtttgatgcctgctttggcaagtgatcaccccttgcttttcccatgtaatatacgcacagaaggctgtgtgggaaaatagaaaaggagaagactacatatgaagaagaaaaccattcttgtggctgccatcgcagtcatgctcgtcgcggcgcttgtcgtcggcggcaccctcgcgtacttcaccgataaagacaatgcgaccaacaccttcaccgtcggcaatgtgaagatcgacctgctcgagtctagcctgcatcgcgagaatgccggttacgtcggcactccgggtgaggagctcaatcccaaaaatgctgagctgtggtccgaagttcttaagctgggttccggcaataccaacaagtataaagctggcgataccttctatacggatgcgcagatcgaagctaacgctgccacgtatacgtgtgacggtgtcgagcttgctccgggacagtcttaccacaagatgccctatgtcaagaacactggtgccaacgatgcttatatccgcatccgcgtgatgttccccgcagagctggatacggctgttcttaacagcagtatgtatacgacaagtgcaattagccgtggcgagttcacgatggtgaaaacagaaaacgttgagaaagacggaaagctgtacaatgtttataccttcactcgcactgaggctctgaagcccaacgaaatgacctattggaacgtttggggcactgttcatatggattccgatgttaccaatgaagagattgcgaacttgcttccgaacggcgcgttcaacgtcctcgttgaggctgacgccattcaggcggacggctttgcgaatgcaaccgctgccttcgctgcatttgacaagtaattcctcaacattttgaccccaaaggggcggcgaaatcgccgcccccatcggggactctggctcggcttcaatccgggcgcgggcggcggcgctgccgccgtccgcgcgcagattgaaataatgatcccacaaaaatttcctgcgtgcgccctcgggcgcagagagagtgagaactcggtactcagaaacatcctatcagggagaaaggtggtttgtgcatgaagaagaaatggaccatcgcaacggtgctcctcctggcagtggcactgctggcggtcggtacgtgggcgtacttttcggccgtcggcacggcggataacgtcatcacgatgggctccgtcaagcttgcactgcacgacgaggacggcgctggccaaccgtttacgacggtgagcgccatgcccggcagcgtcgtgaacaaagtggtgtatgtggagaatgtcggctccggcgctttctacacccgcgtgaagatcacgcccgagatggtcggcgccgatggcgagatcatcccgctcgatgcgagcgagcggctgctcacgctggatctgaacgacacggactggatcgccggcgagggcggatactattactatcgtggttcggtcgacccgaagaccgccacgtcgaagctcttcaaccacgtcacgttcagtaaggacatgggcaacgaatatcagaatgccacggtgcacatctacgtcacggccgaggccgtgcagacggcgaacctcgaaaagtacgctgccaatgatgtcagagatgtgtggaagcacgtcggtacggtcgaagcgagcacctcgagcacgcagatcgaccagatcccgacgccctgagaaaggaggacgactatatgaaaaaacgcattctctcgctcgtcctctgcgcagtcatgctcctgagcatgtgcctgttcatgggcgcgggcgtgacgcaggatgcggcagaagccgcgggcgaagtgccgcagacggcggtgttcacggaggcggggccgttccggccggccgtttccgtgcggccgcagccgctgcgcgccgcagccgaccgcgcggccggcggcgacggtctggagctgagcaaggaagttacggcaaacggcagcggctataccgtgcatctcgaagcgtacacgaccggcacggtcacaacgacgacctcgatcgcaccgtgtgacatcgtgctcgtgctcgaccagtccggctcgatggcgtataattttgacgggaatgagaccagcacggattcggcccgccgccagtatgccatgaagcaggccgtgaacacgttcattgaagcggtggcggataagtataacgcggaaaagtccgatcaccggatcgcggtcgtgactttcggcacgaacgcttccacgctgatggactggacgctcgtgaccccggccgaaacggacacggcggaaagcccgtccggcgagaccgcgctcaaggccaagatcaacggcctcccgtcggagccggagggcgcgacgaatgtcgccgacggcatgcggagtgcgcaggcgctcatgcagggcgacagcggctacaccggtaccaacacgaaacgccagaaggtcgtgatcctgttcacggacggtgtgccgacgaagcagagcgattttgacacgacggtcgccaacggcgccatccagtcggccaaggcgctcaaggacgccggcgcgacggtctattccgtcggcattttcaacggcgcgaatccggagcagctctacggcgacagcggcttcaagtacaacagcaacggccaggtcggaagctactgggccagctttagctggtgggggatcggagacgtcaagaactatgacatcccggccggaaaccgctttttgaactacatctctggcaacttcccggatgcgacggagatcggcatccagcggtacgattccagcttcatcggcatcggcaattatggctggcagatcaccagaaattttgcccgcgagcagtccaactactacctgacggcgaacgattccgcctcgctgagcaagatctttaccacgatcagcgagaacatcggcagcgccaatattgaccttggcagcgagacggtcatcaaagacatcgtgacgccgtactttacggtgccgcaaaatgccggcgctattcgtctctccactgcagcctataacggcagcgcatttggggctccggtcgcagccgatccttcggtgacggcagcgatcgatccggcaacgcgggcggtcaatgtgaccggcttcgatttcaaccagaactatgtctccacaaacgctaaggcggatggcacgttcggaaagaaactgatcatcgagtttgacgtttccgtgcgcgacggcttcctcggcggcaatcaggtgccaacgaatgatgggcagtccggtatctatgcgaagggaaccatgatcaaggcgttcgatgtgccgacgcaggacgtggaagtaaaaagcatcacgccgacggcggatgacaaggcgatctaccttggcgattctgccaatttgcaggagcttgtgcaccagaatgccacatttgacggcacaaataacgcttttgtggatgtgacctatacggtcaaggatgagaacggaacggttgtcggcacgtacacagttcccgccggaagcagcagcggaacatgggtgtggagcgatccggcaagcaacggcaccgtcgctccggagcagaccacgacctacaaggtgacgtgcacggtttcgcctacgcaaacgggaacgtatgagagcgtttctaaagatgctacgttcaccatcacggtcaacacctgcagcctgaagatctccaagaccgttacgggcggcggcgacccgaaccagaccttcgtgttcaacgtcatgaagggcaacgatctcgtgaccaccgtggtgctcaagggcggcgcgagcacgaccatcaccggtctggctgtcggcgactacaccgtggtcgaggacaccgcttggtcgtggagctacacggctgacaaggatggaaaggcagacgtcacgctcagcagcacaacgcccaacggcgaggccgggatcaccaacacctatgtaaagcacgactggctcacgagcattgtcgacgtcatcaacaagtggacggccaaggataatatcgataataccggacatgttccgggctcgggcacgaactgaataggagggatgacatatgaaacgtatctttaacggttcaggcgggagaaaagccgcgctcatcctctccctgtgcctgatcttcgcgctggccgtcggcacgacgctcgcttatctcaaagcgaacacgtctccggtgacgaacacatttaaggctgccacatccgaaattaagatcgaagagaagacagacgacggtatcaagtcggagatttacgtcaagaacgaaggaaccgccacgtcctacgtccgcgtcaagctggtgtgcaactgggtagacaaagacggaaacgtctctgcgactccggtaccggcaccgacgatcacaaatagtgattggttcgagaaagacggcatttactactacacgaagccggtcggaccgaaagattcgactgcaaacctgctgaaagatcccatcacgcagccgaatgcgcccgagggctgccacctcgaggtgacggtgctggccgagagcattcaggccgcgccgagcaaggccgtgacagatagctggggcgtgcgcgttgacaacaacggctatctgacgcagccgaccacgacaccttaaggagggcaacggtatgaaacacaaaaaacttaccatgatcgtcgccctcgtgctggtggtcgcgctggctgccggactgggcatttgggcgacgggcgagacgaacgttcccaccgtcacgtactatgacggctcggacggcaacggcgcgcgcttcaccttcacccacaccggcgacggttcggacacgaacctgttcccgaacttctccaactgcatgcccggcgacagcctcacgcagaccatccgcgtgcaggctgacggcaaaaacggtgtgcagggcgcaaagatctatctgcgcgccgagatcgacggcgacgcctccgccaaggaaggctccgccatctcgtacaacgatgtgctcgatcacatcggcatgaccgtgtcgaaagacggcgtcgtgatcgcgtccaacaagaccgcgaagctcttcagccagctcgatgcggccgatggcctcaagagcaacgtcttcattgccgaggtcggcccgaagaccgatccggtcgatctggacgtgaccattgatgttgaccccgcgatgggcaatgcgttccaggaagcggctgcgcacatcacgttcgtgttctcagtcgaggacaacgagctgccgcccccgccgctggagctcgacaagcacgatgcgtatatctgcggttatccggacggcacggtgaagccggagcgccagatcacacgcgcggaggtcgcaacgatcttctaccgtctgcttcaggacgaggcccgcgaaaatgtgtgttctcgcacgaacagctactccgatgtggcaagcggtgcctggtataacagcgcggtttcgacgctgaccaacgccggtattctcaccggctatgaggacggcacgttccgcccggacgcgccgatcacgcgcgcggagtttgcgacgatcgcggcgcgattctaccacgcaccggaagttaccggtgatgcattctcggatatctccggcagctgggcgcgcgagtatatcaaccgcgcggcggcgcgtggcttgatcgatggctatgaggacggcacattccgcccgaaccagaacatcaagcgcgacgaggccatgaagatcatcaacaaggttctcttccgtacaccggataaggagcatttcctgcccgatatgatcaaatggccggacaacagcaacaccgacgcttggtattacacggatgtgcaggaagcgaccaacaaccacgattacgagcgcgtgaacaacacctcgcccgagacgtggacgaagatcacgccggccagagattggaaggcgctcgaggccgagctggcgcagaaatatcccaaccggtaagcgcgcggcgctgacggtaaacgaaacaaccatagcgaacaccccctgtgcacggcacagggggtgtttttgcgtatgggaaaaaacgtgcgccccggcggctgccggggcgctgacgtagggatacatgcaatgcgtggatgcgttatcagcccagatactgcttgtcgtagttgttctggatgcaggagatgaccttcgtgatgacggtgttgaacggggtgggcacgcccagccgctcgccgtagcgcgcgatggcgccgttgagcacggagatctccgtctggcgctggtgcagcacggcgtcctgcgccatggacggatagtagttgccgaggttggcgatgatgttcggctcttccttttccatgagcggccagagatcgccgatgccgagcgcctgcgcgacggcgcagccctctttccacacatggatgacgatgtcgtggccgtaggggtcggcgaaggtctccttcaccttcagacgcatgacggcgctcacgccgttatagccgctgttggcgatgactttcttccagatgtacgggcgcacatcctcgtcaaagctcgcgttgcagccgcccgcctggaagcacgcctcgagcgccttgccggcggcgtcggccttcgggttgttgtgcacggcgccgaagtgcatctggatgcccttttccggcttgctcacgcacacgccggggccggccagctccgtgccgatcaggccgctgccgtagaggatgcggtcggtctccacgaactgggcgagcacctcgtcgttgccgaggccgttttgcagcgagacgacgaccgtctccggcccgatgcagggcatggtgtcggccatgacgtccgcggtctgcgtggccttgaccatgaggatgaccatatccatggtgccgatgtcgtgcgcggtggcgctcgtgtggaagccggtgagcacttcctcgccctccggcgtgcggaagaccagaccgtcggccacgatcttgtccatgtgtgccttgtacttatcgacgagccagagctcggcgccgcccttgcgcaggtaggcggcgaacacgctgccggcagcgccggagccgatcattgcgattttcatgcgtttgcctccttagcaaactgccggccggttgttggccggccggcagagaaaactcggggtttgaaattacttcaggtactgcttgtcgtagttgccctggatgcagcgcacgacctgggacaggaccttgcacaccggggtgtcgatgcccagctgctcgccgtactccgcgatcttgccgttgagcacgtcgatctcggtctggcggtggttgaagagcatatcctggcacatggacggatagtagtccgcgatgttggtgacgatgtccttgtgatcgtgggcgatgaactcatcggcgtccatcggcacgcccttggcggtcgcgaccgcgcaggtctcacggatgacgctgtggaacagccactggccgaacggatccgcctcgacctcgccgatcttcagacgcaggacggcgcacacggtgttgacggtggcgttcacgcagacctttttccagatgaacttgtagatgttattgtcggtgcccggctcgccgtcgcgccagtaagcgtcgcagccgccggcacggtagcacttgagcatctcggcgcaggccgcgtcggtgagctccgagcggaccgcaccgccgaagttcatctgcacgccgccggccggggtggacacgcagtgtgcgggttcgggcagagccgtgcccagcacgccggagccgatgatgcagcgctctttcgggaagaccttgaagaggttgtcatcgttgccgaggccgttgatgagggagacggcgacggtcgtgtcgccgacgacaggcatggagtcctggatggcctgctcgagctgggtcgccttggtcatgtagatgatgacgtcgaccttgccctccgccgcggccgcgtcagcagcggtggtgtaggtgcggaagcccttgagctggtagtcgtaatccttgtagccgccatcttcctcctgatggatggtgaagtgcatgccttcctcggcgactttcttcatgtgcgcctcgtagcggtcgatgaggatgatgtccgcaccgcccttacgcaggtaagaagcgaagacgctgccggctgcgccggaaccatacattgcaaatttcataactttttctctccttttctgattctgtttgcgatatcttcggccgctgcaggcggatgcctgacggcggattaccgaacggtgttggtgagggtgccgatgccctcgatgctgcacgcgaccacgtcgcccgggtgcagccacttcggcgggtcaaagcccatgcccacgccggccggcgtgcccatggagatgatcgtgccggggcggagcgtcatgccctggctgagctcggcgattacgtacggcacgtggaagatcatgagatcggtcgtgctgtcctgccggagctcgccgttgatgcggctctggattttctgcggcctgcgcacgtcgaactcgtccggcgtgacgatccacgggcccatcggcgtgaagccgtcgaggctcttgccgcgataccactgcttatgctggttctggatcgtgcgcgcgctcacgtcattcaaaatggtgtagccgaacacgtagtcgagcgcgtctgcctcgctgacgttgtgcgccgggcggccgatgacgacggccagctccgcctcatagtcgaggtcggcgaccagatcgctgtggctgagaatgtcgccgccgggggcgacggcctcgttcacgcgcttggaaaagtagatcgggaacgtgtccggcgccttgacgcccttgccggcgacggcctcgctctccttggcgtggtcaaaataattgatgcccaggcagatcacgtcctgctccgggcgggggatgggcgcgagcagccgcacgcgctcgagcggcagcgcggcgctgcgcagcacggcggcagtgtccagcgccggccagatgccgatgagcgtctgtatgtccgcacagcccggcacgggatgcacggcagtgccggccgcgttgagcaggccgacggcgctgcggccgtccttttcaaatgtcacgagcttcataacgtgcgcgctcccctcaaaatcgacattgggcaatggatgtgtacgcaaaatgatggttaaaaattcatcaatcgcgtttgccgagcctgctggcctgtgtcaaaaatatgccaatctcgcttgtcagaaattcgacaaaagatttgcactcccagcgttgttatgatagcacgaaagtgtagacgccgcaactgttttcttgctgtcaaagtgctaaaatcgcataaaatattacaaaagcgccagaatcagagtgcataaaaatacatgcaagattttgtgcaactcgacaattttcagaaaacggctgaaaaaaattggggattggaagaggctgttattgacttttgcgtgtgagagaattataaatttactatcccaagttgttaacgacttgttcataaattaacacatgggtgtggatttcgagccctgtctcggttggtaggagagcacgaggcaggattgaaataaaaaagagagaaaagcaaaaaaagagaaaaaaagagagaggtaaaaaatggataacaaaaagctcaagagcagctgggcagccgccttcaccgtggcgtctgtctggttcggcacccacgtgggcgccggctttgcgaccggcaaccaggtcgtgaactactttgtccagtatggctggaccgcggcgatcttcccgctgctggccatgggcatcctggccgtcgtcatgtacatcatgatgaagtttgccaagctcagcggtttcgacaactacaaggacacctatcgcgccctgtatccgaagccgtggatggaggtcttcttcgagatcttttacatcatcatcatcctcgcggcggtcgcgtcctgcgttgacggcgccggcggcatcgtcaagagcctgatcaacctgcccgatatcatctgcaacctcgtcatcatcgccctgctgatccttctgtcgatcttcggcgttgacctgatcatcaaggcttctaccgttctttccaccgcgatcctgatcgtcaccgcgatcctggtcatcatgggcttcgtcgttccgatcgacgcagtcgctcaggagctggccactgagaacgcggcttacgcttccatcccggccatcgcggacgtcacctcccagaagggcctcgagggcgtctggcgcggcgtgttcgtgtacgctgctttccagtgcgtgtccgtcccggccatgatcgctgcttccaccgagctgacccacaagggcgtcaagcgcgccagcatccttggctggctcatgaacggcggcgcgctcgccgcttccggcgccatgctgctgcgctggtacccggtcctctgcgccatcaagagcgttggtgttgactccgtcgccagcatcgccgcccgccacattgccgacgttatgaagctccccaaccagagcgtcgtcaccctcatgggcagcggctacacctggctgttcgtcgtgtacaccatcctgctgttctgcgcgttcgtgtccacgtccgtcacgctcgtctactccatgatccagcgcttcgagggccactgcttcccgaaggccatcaagagcaaggctgtccgcagcgtcatcgtcggcctgatcgtcatcggcctgtgctacgcagtttccctgctcggcctgtcgaccatcatctccaagatctatggctatgacggctactacgctctgatcgttgttgtgctcccggcgttcatctggggcatcccgaagatcaagaagctgtctgccgacaagaaggcagagctgtcggagtgatctgatcgcggcgcaactctccagcgtcccaacaaaaaatactgaccgctgcgtttgcagcgtagagaggcaaccccgcaggcatcggcctgcggggttgtcgctgtctgcggtatgatagatgcggcgggagacgcgacagagcagcaggggagcccgagggggcaaggctcgcctcgggtgcaatggaccgcggatacgcggaggcaaccccgcaggcaatcgcctgcggggttgtcgctgtctgcggtatgttagatgcggcgggagacgcaacagagcagcaggggagtccgagggggcaaggctcgcctcgggtgcaatcaaccgcggaaacgcggaggcaaccccgcaggcttcggcctgcggggttgtcgctgtctgcggtatgttagatgcggcgggctcccctgctgcgcagatgaaatgctacatcattcgttcggcaaggagcgggtatcgaaaaaaccgccccgcaagttacagaacttgcggggcggttctatgcaatgtgcgtttccggctgcgggcggcgctcacttccagcgccacgtgaacggcacgaacagcagcagcagcgggaagatctccagacggccgagcagcatgcagatcatgagcacgatcttgctcagcggcgagaagatggcaaagcttccggtcggtccgacaagggagagccccggcccgacgttggacaggcacgagagtgcggcggtgaaattcgtcgtgaagtccagcccgtcgagcgacacgatcagccctgcgatgagcatgatgatgatgtagaacgtgaaatacgtcagggcgttgtagacggtctgcgcgtcgaccggcttgccgtcgaggcggacgttttctacgcagcgcgggcgcagcatcttcttgacctcgatcgtgcaggatttgaacagcagcatcacgcgcgagactttcaggccgccggcggtgctgccggcgcagccgccgacaaacatcagcagcacgagcaggaacttggagtattccggccagagattgaagtccgcggtggcaaagcctgtcgtagagatgatcgatgtgacctggaagaacgaatagcgcagcgcatggccgacgccgccgtagagattgcggatgtcaactgcgatcgtgatgacggaaaaggcgatcacaccgaggaaccagcgcagctcctcgttgcgcagcgcggtgcggatgttgccgagcagaatgaggtaatacaggctgaagttggcgccgaagagtatcatgaacacgcccacgacgatgtcgatataggcgctattgtagtagccgatgctcagcgcgcgcgtggacaggccgccggtgccggcggtggcgaacgaatgcagcagcgcatcataaaagctcatgccgccggcgatgagcagaaccgtctccacgagcgtgagcgcgatatacagcaggtagaggatggaggcggtcttgcggatgcgcggcacgagcttgccgaccgtcgggccggggacctcggcgcgcatgatgtgcatcgagcggttgccgctcatgggcagcacggccagcacgaacacgaggatgcccatgccgccgatccagtgcgtaaacagccgccagaacatgccgccgcgcgtcatgctctccggcgatgtgacgacgctggcaccggtcgtggtcagacccgagatcgtctcaaacagggcgtcgatgtagttcgggatgtcgcccgtgagcacaaatgggatcgcgccgagcagcgacatggcgatccacgacaggccgacgatgagaaaaccgtcgcgcgcggtgatgccgccggacttggcgcgcacgcgccacatgaccagcccgatgccgccggtgatgccgatcgtgatcagaaacgggaccggagattcgtcatagatcacagctgcgatcatcggcaggagcatcagcgcggcctcgatgcacagcacgcggccgacgacctgcccgatcattcgaaaattcatggttttgccctctctatgctttcgttatccgaatacggtattatacgccagtttgcccaatttgggaagcccccggcgctcagaacacgccaagagatttgaacagaaagatccacaaaaacatggtcaggatactcgcggccgatgtcgtgaccacaatgtcgccggcgagctcggcgtcgccgcccatctgctgcgccatggtgaaggaattgacggcggtcggcgaggcgaaaatgccgatgagcgacacgaatgccacgccccggaacccgagcagcgcgcccagccccagaaacaggcccggcgagacgatcagcttggcgatcgacacggtcacaagttcgcggcggtaggtcttcaggccggagaactggaagaacgcgccgagcaaaaacagctgcaggggcgatgcgatggcgctgacgctttggatggtctgctcgaggatgtgcggcaggcggatgccggcgaccagcgtcaggatgccgagcacggagccgatgacgagcggattttttgcgatctggccgaggatgtgcagcggcttcggcttctgtccgcggaacacctccagcacgacgacggccagcatattgaacagcggcacaatgaccgcgatcaggatcgagacggtgccgagctgatcggcgccgagcagcgccgtcgccacggggatgcccatgatgacgtagttgctgcggaacatgccctggatcagcacgccgcggcgctccggcagcttttcggtcagcagcgtgtagccgagcgcgaggccgaacgtcagcagcacgccgcccacggcataggtcatcagcagcgggtcaaacgagccggacagatcggagcaatatatattataataaagcaaacatggcagaaaaatacggaaagcgatcttgttgatggtggagatctcctcacggcggagccagccgaggcggcgcgtgccgtagccgagcgccatgaccaggcacatgggcagcacggcgtttgccgagatcatcagattttccatatgtcgcctccgttcgtcaggaaatcactaaagtaacagtttaccccatgcggcgcaaaaacgcaagtaccccggttgccgcgctgcgcggaacgtggtataatcgcagcatctgattttttgcgcgggaggtgcggcgatatgacaattgagcaggccatggagctgatccatggcgtcgcgtggcgcggctcccgcccggggctcgcgcgcgtgcgcgagctgctgcaccgcctgggcgacccgcaggacgggctgcagttcgtgcacatcgcgggcacgaacggcaagggcagcacggcggcgatgctcgcatccatcctgcgtgcggcaggctacacgacggggctattcacatcgccgtatctcgagcgcttcgccgagcgcatgcaggtcaacggcgtgcccgtgccggacgcggagtttgccgccgtgtgcgaggcgctgcagccgtgcatcgccgccatggacgacccgccgacggagtttgagctcgtgacggcggcggccatgctgtggttccggcggcggggatgcgacgtcgtggtgctggaggtcggcctcggcggccggctcgacgcgacgaacgtcattgccgcgccggcgtgcgccgtcatcacgaacatcggcctcgaccacacggagatcctcggcgatacgctcgagcagatcgcgcgcgagaaggcgggcatcctcaagcccggcacgcgcgccgtcagctatccgcagacgccggaggtgcgcgccgtcctgcacgagatctgcgcgcagcggggcatcccgctcacggaggcggacgcagccgccatcgtgccgctgaccgacggcgtggacgggcagaccttcacctaccgcggcgcggaatatacgctgccgctgctgggggcgcaccagctgcgcaacgcggccgtcgcgctcgagacggtgacggcgctgcgcgcgcgcggctggcgcatcccggacgcggccgtgcgcgcgggtctggcgcaggtgcgctggccggcgcggtttgagctgttgcggcgcgcgccgtggttcgtgctcgacggcgggcacaacccgcagtgcgcgcagacggtcgcggacaatctcgcacgctattttcccggccggcgcatcacgctgctcgtgggcgtgctggcggacaaggactatcccgccatgctcgcggcgctcgatgggcaggcggcggcgtacatcgccgcgacgccgctctcgccccgcgcgctgccggcggcggagctgggggactatctgaaacgattcgggaaaccggttacggtctgcgcggaccccgcgcaggcggcagagctggcgctggcacacgcagcgccggaggacgttatctgcgcggtcggctcgctgtacatggcgggcgcgatccgcatggatctgcggagggatcacaatgagaattctgggcattgattacggcgacgcgcgcatcgggctcgcgctctcggatgcctcggccacgctgtgcggccgggcgtggacgctcacggagtggaatctcgaccgggcggtcgccgcgatcgcggacgtggtgcgcaccgagggcgtggagcgcatcgtgctcggcctgccgaaaaacatggacggcaccgagggtccgcgtgcggaaaagagccgcgcggtcgcgcagcggctcaccgaggcgacggggttggaggtcgtgctctgggatgagcggcgcagctccattgaggcgcacggcatcctgcacgccaacggccgcaaggagaaaaagcaccgccagacggtcgacgccgtggcggcgagcctgatcctggagggctacctcggcacgctgcactgaggcgggaggcgagacgatgcgcaagagaaatatcgcggtgctgctgctcacggtgctgctgctcacgggcctgaccggctgcgcgcggcggggcgacacgtcgggcgttgagatcgtcgtgggtgcgtcggagcagttttccgacgaggacatccgcggcgcgatggacgctgccatgcgcgcgtttcaccgcgggcacagcggctgcgccatggtgcgtctggcgtacaacgaggcgtaccggacgtgctggctggctggcgcgggcgcgcaggacgacggcaacacgatcgtgctgcttgcgagcgtgtatgcgcgcgacccggggcggcgcagcggcctgaccgccggcgagacttataccgactggcccatcgtgctcgagcggcgcggcagcggctggcacgtggtcagcagcggctattgaaaatgtagcaagggcggacgccatatggcgtccgcccttgcttttgtgttcgcttcacatttcctcgacggtcagaatgtccggcagcgcagccagatcgttgcgcaggtcgccgggccgcagcggggcgcggctgtggatggggatgagcgcgcagtagtggtgcggcgcgtcgggcgcgtcggtgtccgcgatgcggctgatctcgagactttcgatctggacgcggcgctcgcgcagcagggcgagcacggactccatgcacacggcgtgcgcgtactcgatgtagagcgtgaggtcggtgttcttgctcgtgagcttgaactccagccggatgagcaccagctcgaccacgagcacgacgagcgtggcaaaggccgcgcactcgacatagcccgcgccgcaggcgaggccgatgatggccgcggcccagagcccggcggccgtggtcaggcccttgacgcgcttatcgcgcgtgacgatgatcgtgccagcgccgatgaagccgatgccggagatgacctgtgcgccgaggcgcgcaacgtcggtgaacaaatgcagggagagcagcaggtactggctcgtgagcgtggtgatggcggcgccgaggcagatgaggatgtgcgtgcggaagcccgcggggcggcgcttcgtctcgcgctcggcgccgatcacgccgccgcagacgacggccagcgtcagccggacgagaatggcccagaagctcagggtgcggatggggtcaaaacaatgcagcatggcacagcctcctttctcagatctcttcgatgaggatcacgccgtcgagcgccgacagctccgccagcagctcggggtggtcgcgccggtcaggcagcacggcgctgaactggcacaggaagttcggcagcgcggccgagccgctgcggttgacctcgaagtcgaaaatgcgcgcgccctgcgcgtgcagatgtccgacgacggagccgagcttttccatgctctcgatctcgaggctgatgttcatgtggtgtgcgcggcgggtcatgcgccgctcgagcggcggcagcgcgtacatacacacgatcatgaagagcatgctgatgaacgcgcaggaataaaaccccgcgccgatggcaaggccgagacacgcgctcgcccagagtccggcggcggtggtcaggcccttgacctgctggcgggcggtgatgatgatcgtgcccgcgccgagaaagccgatgccctttgcggcctcggcgccgaagcgcgacacgtcctgcgtcgcgccgatgctctcggcgagcgcgcgccacggtccgtggagcatctggtcgagctgcaggctcagcagcacggtgagcgtcgcgccgagcgccgtgagcatataggtgcgaaagccggcggggcggtttttgcgctcgcgctcaagcccgatcagcccgccgcagagcacggcgaggaggatgcgcagcatcatcgtgacgatattcagttcacgcaggtaggagagtacagacgccatggatgcgattcctttctgagctggttacaggctgccgctgcgcggcttgccggtgctgccgcgcacgatgagccggctgcggtattccacgcggttgatcggctgatcctcccgattgttcagcccgccctcaatgcgctcgagcagcaggttgaaggcgctcttgccgtggttgaatgtgtagttttccacacttgtgagctggatgcgctgatagcccgagctcgtgacgttatcaaagccgcagagactgaaatcctccggcacgcggtagccctcgcgcacgagcgcgtcgagcacgccgtaggccaccatgtcgttgatggcgacgatgccggtgatcttgtcgttgcgcaggcatttataggccagctccatgcccgaacggtactccaggtcgggcgtggtgatctccgcctcgagcgagttgacgtgcgagcagatggtcacgctgccctccggacaccacatatggtaggcctcctgcaggccctgtgcgcggcgcatccgggagatgtggtgctcgttgagcgccgtggacaggtaggcgatgcgcttgtggccgaggccgatgaggtgcttggccacgagctgcgccgcgccgaaattgtcgacgtccacggtgtcgatgccgaagtcaacgacccggtcgccgacggcgacgatgggcacacggtggctcagttcgcgcaccttggccggctgcgtcggcgtcatggcgaagatgatgccggccacgcgcgagaagtccagcgtgtcgagcaggtggctctccgtgcggggattccaataggtgttgtagatcgcggtctggtagccggcagcgctggccgccgcgtcgatgccggagatcatcatcgtgtgatagggattcgagaccgacggggaaaggatcgcgatctgtttgccggcgcagcgggccgacggcgtgcggtagccgatgcgctccgcctcggcgaggacgctggccacgcgctgcgaggaaaagcgctcgagcgacttgccgttgaggatcatcgagacgctcgccgtcgaaacgccggtcgcctccgcgatgtcgcgcagggtgggtttgctgctcataggcacctccggtgacaacacgagaagggagacctttgtgttgaaaaattaagcatttttcggtgaaaaatcgcgcttttgcctttgcagtttcaccaatttccaagaggagtatatagcgaaaacagaaaaatggcaaggaaaatttccgttcatgttgacggcatcgcacaaaaatgttaacatttttcacagagagccgttaaaatgacggagaaaaattcaacgctttttttaagcagaaaggaactaccttgaagaaatttgttgctatgcttcttgcgctggtcatggtgttcgcactgtgtgcctgcggcagcaacggcgataaggccgctgacgacaacaacggagattatcatctcgtgctcaagctcagccacgtctttcagccgaacgagcagctcacgatcgagatgcagcaggtcgcccagcgcatcaaagagcgcaccaacggcgcgatcgagatccagtgctacgactccagccagctcgccgtctataaggacaacatcgagcaggtcgtcaacggcgccgactggatcgcctgcgaagacccctcctacctcgccgactacgacatcgactttgaagcactcatcggccccatgatgtacaacagcatcgacgagtactcctacgtctgccagtccgatctggtaaagaatatgtgccagaagctcgaagataactacggcatccacgtgctcgcgctcgacttcaacgtcggcatgcgctgcctgcagaccaacaaggtcatcaagacccccgctgacctcaagggcatgaagatccgcgtgcccaacagctccatgtacatcaactgcctcacggccatgggcgccacgcccaccggcatgccgttctccgagacgatctctgccgtgcagcagggcgtcattgacggtctggaaggcaacatgaacgcttactccaccaacggcagctccgaagtgtgcaagaacatgtccctgaccaaccacctcgtcggcacctgcggcgcctacatcagcaccaaggtctggaacagcatcccggaagagtaccgcaccatcatccaggaagagttcaccaagggcgctaaggagctcaccgacttcaccaacgcctccttcgacgagacgaaggccaagctcgagaaggagcagggctgctcgttcaacgaggttgacgtcgatgcgttccgcgccgctgtgcagccggagtatgaccgcatggtcaaagaggacggcgtgaccgccggcttctttgagcaggcgcaggccatcctcgcccagtaccgccaggccaacaagtgagcgctgcgcgctgacggacggtcggaagcctcataccggcttttatgccgggtgtcccgcacatgctgccggacacccggcattgctgagcaaagccacagaaagcagagggttatgcgaatttgaaaaatctactgaaaaattttgacggggtcatcgcgggcgcgatgatgatcgtaacgatcctgctcgtcatcgtcaacgtgatcacgcgaaaactgtttaactatatcatcatctggagcgaggagatcgccacctcctgcttcgtgtactcggtgttcatcggcgcggcctatgcctaccgcaagcaccagcacgtcggcgtcgatctgctcgtggagcggctgccggccggcgcgcgcagggtcgtgcatctgatcaccaacgccctgctcgtgatcatcaacggctacatcacggtgctcagcgtgcagtttatccagtcgtcctggatcaagcgcatgccgatcacaaagctgccgtcctccgtggtcagcacggcgctggtcatcggcttcggcctgatgacgatctactcgctcgtctttttcgtcaaagacctcaagcgcagcagcagcctcgacggggaggtggacgcatgagcacgttcctctccatcctgccgatcatcatcgcgcttgtgctgtacttcacgggcatcccgatcgcctacgcgctctttgccgcggcgctgacctactttggctttattgacacgacgacgatgccgtacctgctgatgcagaaattcgtcacggccacgcagtcgttcccgttccttgcgatcccgtttttcatcatgtgcgggtcgatcatgaactacggcggcatcagcgcgcggctcatggactttgccgacgcgctcaccggtcatatgcgcggcggtctggcgcagatcaacgtcctgctgagcatgctcatgggcggatgctccggctcggccaacgccgacgccgccatggagtgcaagctgctcgtgcccgagatggaaaagcgcggctacggcaagggcttttccgccgcgatcacggcggcgtcctcgtgcgtcacgcccatcatcccgcccgggatcaacctcatcgtctacggtctgatcgccggcgcatccgtcggtcagctctttgctgccggctacgtccccggtctgcttatggctgtggcgctgatgatcgccgtggcgctcatctccaaaaagcgcggctacgcgccgtcccgcccccgccgcgcaacgctcggcgagatcggccggcaggcgctcaagtctttctgggcgctgtttttcccgctgggcatcatcatgggcatgcgcttcggcatcttcacgccgacggaagccggcggtgtgggcgtgctctactgcctgatcgtgggcaagttcgtctacaagggcctgaaaaaggagcactttatccccatcctgcgcgagaccatctccggcaccgccaccgtcatgctcatcatcgtgtcggcgaccgtgttcggctactacctcaactgggagaacatccccaccatgctgctcaacgccgtgacgagctttgccagcaacaagttcctcgtgctgctggtcatgaacgttgtgctgctcatcgtcggcatgttcctcgagggcggcgcggcgctcatcatcctcgccccgctcatggtgccgatcgtgaaggcggccggcatcgacctggtgcacttcggcatcgtgtgcaacgtcaacatcatgatcggcggcctgaccccgccgttcggctcgatgatgttcacctgcgtgtccatcacggactgcaagatgcaggaatttatcaaagagtgcgtgccgtttatcatcgcgctgctcatcgcgctgctgctgctgacgtatatccccggtatctcgctgctgataccgaatctcatttattaagggagacaattgcatgaaagttatggcacaccgcggctacagcggtgcttatccggaaaacacgatgctctcgttccgcgaggcggtcaaggtcggctgcgacgcgatcgagatggacgtgcatgagacgcgcgacggccgcctcgtcgtcatccacgacgagcgcctggagcgcacgaccgacggcaccggccgcatctgcgagcatacgtttgacgagctgcggcaggtcaacgccgctgcgcgcttcgcgggcaagtacgcccccgagcgcatcccgtcattcgacgagtattgcgagtgggcgtccggcgagagcgtcgggcacaacatcgagatcaagaccgacaagatctactatcatgacatcgagcgcaagatctgggccaccatcgagcgctacggtctggagcacaaggtcatgttctcgtcgttcaaccacttctcgctgcgccgcatcctcgagatcagcggcaacgcggtcgaagtcggcgcgctcgtgctcgaggacagcatcggcggcttccccggctactactgcgagcaggcgggcttcgcctgctaccacccgccgatcgagctgctcacggatgagaacgtgcgcgactgcaaggagcacggcgtgaagatgaacgtctggaccgtcaacgacatggcgggtctggagcagctccaccgctggggctgcgagggcatcatcacgaactaccccggcgtggcgagcggctggctgcgcgcgcagggcgagtgagccggacgcggcaaatagtcagataaagagacgacgcccccgagagcctttggctctcgggggcgatttctttgcccaaaagcattcttttctgacagcaaaaaactccctccggaaaaccggagggagtttcgcgtttgtagggatgggatcagatcttcatgcagacgtcccaggcacgccagatgacggtgcgcaggttgccgatggcaacgcagtcgcccacgcggaagacctgcttgttgtccttgccgccgaccggagtcgggacaaagccgatgccgttgacgacgttgtcgcactcgacgaagaaggtctcgccggtcttgacgttcttgacggtgacaccgttgtccttgatctcggtcacggtggactcgaggtaggtcgggaccttgtggtactccatcgcgtcacgcaggaaggaggtgttggcaaggcaggtggcctgtgccgcgacgaggtcgttcgcgtactcgacgatgatggggtgcttgccctgaaggacaaggtcatacgccgcttcgcaggacgactggccgccgccgatgaacaggaccttgtcgccgacttccttcttgtccttgagcagctcggtgaacgtgagcgtcttctcaaagccggggatggacggcatggtgcgcgggatggagccgctggcgacgatgatctcgtcaaagccgcgcagggtgttcacgtccgtgacctcggtgttcaggcgcacgtcgatgccctccttggcgacctcgttgaggtaccagcggatgagctccttgtcgttctccttgaagctcatcgcggacgcggtgaggaacaggccgccgagctcgccggtcttttcaaagatgaccggggtgtggccgcgctgcttgagcacgagcgcgcactccatgccgccgatgccgccgccgatgatggcgaccttcttcggatggcgggtcgggacgatcttgtacttgttgtgctgcatggtcgtcgggttcagggcgcagcgggccaggtgcagggagtcgtccatgctctggaggttcgcggtgcctttgaacttcgacatgttgaagcagccgttgtggcagcggatgcagggcttgatctcatcctcgtggccgctgaggatcttgtggacccactcgtggtcgacgaggttctggcgcgcgatggccacggcgtcgagacggccggcggcgatctcttcggcggccttcacggggtccatgcggccggcgcagacgaccgggcggctcgtgaactgcttgatgtgctcgacatactcgaggttgcagttatcgggcatgtactgcggcggatgtgcccagtaccaggcatcgtaggtgccgttgtcgcagttgaacatatcgtagcccgcgtcctcgaggtacttgacggccttctcggactccggcatatcgcggccgaactcgacgaagtcggtctcgtacggcatggcgcccttgccccaggccttggtcttggacacgacggagtagcgcagcgacaccgggaagtcggagccggcctgacgcttgatctcctgcacgatctcgaccgggaagcggaagcggttctcgaacgagccgccgtatttgtcggtgcggtggttccagttggccatggtgaactggtcgagcaggtagccctcgtgcacggcgtggatctccacaccgtcgacgccggcggcgcgcagcttcttggcggtctggccgaaggcgtagaccatgtcctcgatctccttgaccgtcagcgggcgggacatgacgtcctccttccagcggttcggaacctcggacgcggaggcgcagatgtactgcacgtccacgatggggctggcgatcttgttgaggacgttgttcttggccagcttcgtcatccagccgttgatggccatggagcggcccatgccggcagcgagctggatgaacagcttcgcgcccgtcttatggaactcgaccatgtactctttgagctgcttgaacatctggtcgttctggtacagccacttgcggccggggatgcccagcgggtcgcggatgcactgcataccgggcaggatcagacccacgccatcctgtgcgcggttgagcaggaagtaggctgcttccttgtcaaagtggttcggctccatccagccgaacagggacgtgccgcccatggagcactgcacaatgcggtttttgatctccacattgccgatcttccagggggtgaacaatgcgttgtacttttcgttcatgtaatacgctccttctatgttttaggtctccacagacccggggttacgttcttccgggacatggatctcccggacggtgaagtccctgccggacagcaccgttttgttgaagctgttgcagtttgggcaatgcccgttgcacgcgatgacattgaagatctcgtcgcagtcgtcgcactcggccatgccgggcacgatgttgacgatgagcttcgtgtctgcaaacggcgtgcccttgacgaccgttggatagatctgctcgacatactgcgggatgacgagcgagagctcgccgcagtcggccacgatctccgagacgcggctgacgccctttgccgccgcgtaatcggaaacggtccggagcattgcgcgcacgacgccgatctcatgcatggcggcgtcctcagtgctgcagcttcttgcgcacgaagcggcggccggcggcgggcgcattgctcgcaaccgtcagcagggtgcggaaatagccgcggccgtgcgtgtcgttgaccttctcgagatggatggcgtcaaacttgcacttggtcgtgcagatgccgcagccgatgcactgatcctcgttgagcaccacggtgccgcagccgaggcagcgcccggcctcgcagtgcagctgcgcgtcgctgagcaggccgttttccgctgcctgccggggcgcggactccagttcgtcgatcgcaacgccgacgctgctgcgcgccagcggcttatagtcccgcttgtcgcggccgatcacgaagctctggttgctgtgcacgaagcggtggatcgagatcgcggcctcgcggccctcggcgatcgcgcgcgcaacgtcatgcgcgccggtcgcagcgccgccggcaaagacgtcggcctcgccggtctggcgggtcacggcgtcggcaccgacaaagccgtcggcattcaggcacacgccggatgcggcggtaaaggcgtccgctgccgggacgtagccctcggcagcaaagaccgtgtccgcggcgagcgtctcggtcttatcgccgtgcaggctgcggatggacaccgcaccgtcgcggatctcctgcaccgcgaacggtgcgcggaacgcgatgccttccttcttggccgcggagatgtccgcctggatcgctccggcgacgacggtcacgcttgcagcgccgcccttgcgcgcggcgcgcgcacagtcaacggcctctttcccgccgccgagcacgaccacgctgcccttgacggtgtgccttttccggtgcaggtatctgcgtgcgtccacggcgccggccggcgcatccttgctctgctttccggcgccgatgccgaggaagaacgccttgtagccttctgcgcgcagcgcgtcgagcgtcgtgtccttgccgacttccacgccggtgcggaactccacgcccatgcgcgcgagcacgtcgatctcggcgtcataggccttgcggtcgagccggaacgacgggatgagcgttgccggtgcgccgccgagcaccgtgtccttttccagcacggtcacggggtagccctgctgccggaggaaataggcgcagctcagtccggcggggccggcgccgatgacggcgatcttttccgtatgggggatgccggacgggtttttcgccggcggcaaaatgaccttgccggcgtccagctcgcgccggacgagcgttctgcacacgtcggcaatggcgacggcggtgtcgatctggttgcgggtgcagaccttttcgcactggcggccgcacacgctgccgcacagctccgggaacggcgtggcctgccggatgagcgccgcggcgtcgtcgtatctgccggcggacagcagctgcaggcagccctgcaccgggatgttcagcgggcaaacggccttgcacggcgcggtgccgctgggcatgacgtccgagcggttcgtgcggaattccgggtcatagctccggcggtcgtagggcacgctggcgtcggtgtcgtaggtatcggagatgtgcggatcggtcgtgcagcgcttctggccgagcttgagggcgttggtctggcagttttcgacgcactggccgcaggcgacgcacttttccttgtccacgcgggcgatgtagttcgagcggatggcgcgcggcgtgcggaacagctcctcgatgcgcagcgcgaagcacgagcagccgcagcagttgcagatggcggtcgcgtcctcaaagccgggggtctggttgatctcgtgcacgagaccgttgtcctcggcgcggcggaggatctcatacgcttcttccttcgtgacgagccggtgatagccctgctcggaatagcagacggcgttgtcgttgaggtacatgcacatgtcctcttcaaggtggccgcagccctcgcccatgaggcggcgggcccggcggcacgagcacgggccgacgctgatggccgtcgcgttttcgatgagcgtcttgagctcgtcataggacgccgtgcgcgtgtcgttctcgatcgcgctcatgacgggcatgacgcgcatgaagaacatgccggtcttgccggagtcgagcatcggcgcgagcatctccggacggcggcgggtgtatgcctcaaagctctcgccgagcacgggatacttgtcgcactgctcacggttggcaaggatgccctccatgatgcccggcacccagatggggtagaagtagcagcgcttgccgtcgacgtagcggtagcgcaccgcgccggtcttggcgagcttgtcgagctgcgtctgcgtgtattccacgctctgctttgcgcgcttggccacgtcctccacggtgcggttggcctccaggcgcaggtgcatcatgatcgcacacatctcatcgtcgatgatcggctcgaggatcttgtactcaggatcgttgtacgtgatgccggtgtacgtcatgctctcaagactgatcttcgtggccagcttgagaatattcggtcgttttgccatgccttttcctccttcaatgacgagtactatttaaaaggtattccctgtccctttttctcccggtggcggcgctgcgaatgcgcgcgtgaactgctcgcacagcgcgtcgatgcgcgcgtgcccgtcgagctcgtgcacgctcggcacgccgacggacatacgctggatgacgccgaggatcgcgtcgtaggcgttgtagtagagcatcttgacatcggcgtcgggatcgaccgtcccgtcggcgaggccgcggcggatggccgccgcgatcgggccgggggcgacctcaaagcgctccggcgggcggttgacgaccgcgtgctgccggccggcgttgcacagcgcgacctccgcgtcgagcgagaagcggatgcccgcggggtcggtgaagatcagccccgcgtagctgcgcagcagcacgcggatctcctcgatgccggtcatgcccggctgccgcgccgagacgagcgcctgcgctgcctgcgccttggcccgatcccagtagaggaaggccgccgcgaccacaagttcgtccttcgtggcaaagtagcggtagaccgagcgctcggtcagccccgcgcggtgcgcaatgtcgcggatggtcgtcttgtcgatgccgttttccacaaagcacgctagtgccgtctgcttcacgagagcaatattctgttcccgcacctcctgcagcgacatgggcgtacctccaatttgttcattataactgtcatactgactgacattttcattatacctgcttcttcccaacatttcaaccgcaatttgcgtgatttttaacggatttgacatgaaaaaaacaccggtacggtgaaaaaccgtaccggtgtgcgtagggaatgttacactgggtagtcgccggagagcttttcgtcggcgttcgtgccggtgtctcgattgcggaagaaggcgaagtacgccaccacgcacagcgccacgagcgcgtaggcaaagacgatgacggcggtgttgccggccgcgatctcgctctgcaggccgccgatctcgacgatgaggatgagcgccggcgtcacgaagcggatcatgacggcgtagaccttcttgagccagccggccatgtgcgtgccctcggcctcgatctcggccacggcgcgcttgggcgtgatgaaccagccgacgacgatgcacgagaacagtgcgcacacgggcatgagcacggtgttggtcacttcgtcaaagaacgtcagccagtcgagcccgaacagcgcggggctggactcctcgaggatggcgacgtggccgagcgagatgccgatcgggatcgacacgacgaagcacacgcacgcgacgacgagtgcggcccgcttgcggtggacgtggaacttctggatgacgaactgcgtcacgacctcgatcagggacacgacggacgtgatggccgcgatgtcgaccatgacgaagaacgcgaacgacacgacctgacccacgctgcccatggactcgaacacctgcggcaggatgatgaacatgagcgcgacgcccttgctgctgccgagcagggaggggtcaaagtgcgcgacggacgggaagatggccagaccggccagcagcgccacgaccgtgtcgaacacgcagaccatggcggtggagcgcacgaggttgacctccttgccggtgtaggagccgtaggtgatcatgatgcccatgccgagcgacagggagtaaaacgcctggcccatggccacgagcacggacttgaacgtgatgccggagaaatcgggcttgaggtagaacgccaggccctcgcgcacgccgctgccgagcgtcagcgcgtagaccgcgatggcgacgagaatcagaaacagcaccggcatgagcaccttggaggctttctcgatgccgtccttgacgccgcccatgatgatcgtcacgctcagcacgagaaacagcgccgtgtagagaatgacctcacccgtgttgacggagaacgtgctgacgatgcccgcgttgccgctgaaggagttgagcgcgtacttcgtcgtccagccgccgagcacggagtagtagcagatgatgaacgctgggatcatgatcgccacgaggccgcaccagccgaggtttttgttgaccatcttgtaggcggtcatggggtttgcctgcgagcggcggccgagatagatctcgctgagcatcgtgacaaagccgatgagcagcacgcacgcgatgtagatgagcacgaaggcggcgccgccgttttgcgacgtcttgtacgggaagccccagaggttgccgaggcccacggcgctgccggcggcggcgaggatgaagccgataccgctggcaaatccaacttttttcttttccatgacaggtttcctttccgaccatttcgttttttatacaaaaaaatcggccccgaccaaaacggtcggggccgactcttggtatgccaagtgctgtcgtgttatcccgcgaataccggtttggcgtgtcctgttggcggcgtaatgcccagaatgccgagtataacaaaaatcgacactgcaagcacagtgtcgatggtaagcaggaggacgctattgttgttggtattcgcgtcagagcatgcgaagccggccgcgcacgtggtcgcggtgctgtcgtttttgcggctgaaaaacgaattgcgcatggcttgcagctcctctcgaatggatgtggctgtcattgtacgcgccggggcggcggttgtcaacggcgggatgattttgcatttttgataagggcgtttcaaatttttgaatcattctgcaaaaaaaccggcgcacggtgttcaccgcgcgccggggagcgaaaaagcagatcaggcgtttgcttcgagcttgtgcagggctttgcgaaactgcgtcgcaaacaggatggccgtgcacgtgacggcaatgacgtctgcgaccggctcggccagatacacggccgtcgtctggtcgggcagcagcgccggcagcagatagatcagcggcaggagcagcacaaacttgcgcagcacggccacgatgatcgagcacaccgcgctgccgatggacacgaatgtcatctggcaggcgatctggatgccgaacaggaacaggcccgcgcagtagatgcgcagcacgcgcgccgtgaaggcgatgagctccgcgtccggcgtgaagatgcgcgcgaacagaccggggaagagctcgatgagcagccagagcgagacggagtagatcaggcacaccttcagcagcaggtggaacgtttcacgcacgcggtcggtgttctttgcgccgaagttgtagctcgtgatcggctgcgcgccctgaccgatgccctgcagcggcagcatggcaaactgcatcacgctcgtgaggatcgtcatggcgccgacggcgatgtcgccgccgtacttgagcagggaagcgttgaagcacacggagatgacgctctcgctcgcctgcatcgtgaacgtggccaggccgagcgccacgcacggcaggatgagcttcggcgagacgaagaggttttcccgccgcaggcgcaaaaacgccttcttcccgcacaggaacaccagcacccacgcgcacgagagcccctgcgagagcacggtcgccagcgccgcgccgcgcacgcccatgcccagcgcgaagatgaagatcgggtcgaggacgatgttcgccgccgcgccgatgagcaccgtgtacatacccaccttggcaaagccctgcgccgtgatgaacgcgttcatgcccagcgtgagctcgacaaagagcgtgccgaatgcataaatatgcaggtagtcagcagcgtagtcaatggtgttttcactcgcgccgaaggccagcagcgcgtcgcgcccccagagcagcagcaccgccgtgagcacgacggagatgccgatctgcagcgtgaagcagccgccgagcgtcttttccgcgctgtccatatcgtcgcgccccatgtagatcgacgcgcgcggcgcgccgcccgaggccgtgaagcacgcgaaggccgacacgatcagaatgatcggcaggcacacgcccacgccggtcagcgcgctgctgccgacctcgggaatgtggccgatgtagatgcggtcgacgatgttgtagagcatgttcacgagctgcgcgatcaccgtcgggatcgcgagccggcgcagaagctgtccgaccggctccgtgccgagaaatgttttgtcctgctgcatttaactttcctccctgttggccatgcggtcgagattctgcgcgaacgccgtcagacactgctgaaacgtttcgagcgcgtcgggcgcgaggcccgcggacatctgcgcggcgaactgctcctgcagcgcctggccgcgcgcgatgatcggcgctgccttgtccgtgcacacgagccggcagcggcggcggtcgccggggtcgcgcgtgcgcagcaggtaacccccgcgcacgagattgtccacgtggaacgacacgatgcccggcttgagcttccggtacgtgcagatgtcgcgcgcggtgtctagccccggattgttggccagaaagagcagaatgtccacggcattttgcgccatgtccagctccgcgctcagcggctgcatgacggcggcgtaagcgtcgaggatgcggcgcgtgtaggtatagacctgagatgcgttgagcacgatggtcgcctcccaaaatagttcaattttgaacgattttgtattataccagcttccgcccagaaagcaagcggaaaattgtgaacatttgtgcgttgacaacggcgcgatcatgtgtataattgtatacaataatacaaagcaacagaaaggagccccactgccatgcttgaaatatccggaaagacgaatttactggagcagaatgcgtataaatattcgctccaggacgtggcggagccgaacctccagcgcgacatctacacgcagggaatggtgccgaaggtgccgttcaaccaccggcgcgtgccgatgaacatgcccgaggagatctggatcacggacacatccctgcgcgacgggcagcagtccgtggagccgtacacggtcgaccagatcgtcaacatttataagtacctgtcccggctcggcgggccgtatggcatcatccggcagacggagtttttcatttacagcaaaaaagaccgcgaggcactcgaaaagtgcatggagctggggctgaagttcccggagatcacgacgtggatccgcgcgacaaaggaggactttcgcctcgtgcgcgacctcggcatccgcgagacgggcatcctcgtcagctgcagcgactaccacatcttcaagaagatgaaaatgaccagaaagcaggccatggactactaccttgccaccgtggccgatgcgtttgaggccggggtcgtcccgcgctgccacctcgaggacatcacgcgcgccgacttttacggctttgtcgtgccgtttgtcaacgagctgcaaaagctctcgcgtcaggcgggcatcccggtcaagatccgcgcgtgcgacaccatgggctacggcatcccctacacggaggcggcgctgccgcgcagcgtggccggcatcatctacggcctgcagcagtactccgacgtgccgagcgagtgcctcgagtggcacgggcacaacgacttttacaaagccgtcgtcaacgcctcgaccgcgtggctctacggcgcgtgcgcggtcaactgctcgctgctgggcatcggcgagcgcacgggcaacatcccgctcgaggcgatggtgttcgagtatgcgtcgctgcgcggctcgctcgacggcatggacccgacggtcatcaccgagatcgccgactacttccagcacgagatcggctacgacatcccgccgatgacgccgttcgtcgggcgcgacttcaacgccacgcgcgccggtatccacgccgacggcctgctcaaggacgccgagatctacacgatcttcgacaccgagaagctgctcaaccgcccggcgtccgtgcaggtcggcaagacgtccggccttgcgggcatcgcctactggatcaaccagaactaccgcctgaccggcgaaaagcagatcgacaagcacgacccgctcgtgctcgcgctcaagggctgggtggatgcggaatacgaggacggccgccagaccgtcttgtccgtcaaggaactcaaagccaagatcgcggagctggcgcccggccgcttcgcgcaggtctgacaggaggcgcagtatgaaagatttccgtaccgttacgctggccgatcaggtgtttgagcggctggaatccgatatcattcagggcgtgtacccgcgcggcgaggtgctcacggagctgaagctcgtcgagcagctcaacgtcagccgcacgcccatccgcgaggcgctgcgccgcctcgagcaggagcacctcatcgccgacaccggcaagggctccgtcgtgctcggcatcacggccgaggatctggtggacatcatggacatccgctgccggatcgaggggctcgcgtcctactacgcggcgaaaaacgtctcgcccgaggggcttgcgcgcctgcggcacattctggacctgcaggaattttactttgaaaagcacgacgccgagcacctgcgcgagatggacgaccagttccacgacgtcatctgcgacatgagcggccacgccgtcatcagcgacacgctcgtcccgctgcaccgcaagacccgccgctaccgcaaggcgtccattgccgacgcgaagcgcacggcgcaggtcgtcaaggagcaccgcgccatcttcgacgccatcgccgccggagacgccgaccgcgccgccgcgctcacgaccgagcacaccatccacgccaaggaaagtatgattgggaggctgaaaaatcatgggtgaaacgcttgctcagaaaatcatccgcgcccacctgctgcacggcgacatgacgcccggcagcgagatcgcgctgcgcatcgaccagacactcacacaggacgccaccggcacgatggcctatctggagtttgagacgatgggcatcccgcgtgtgaagaccgagctgagcgtggcctatgtggaccacaacacgctgcagtccggctttgaaaacgcggacgaccaccgctatctccagaccgtggccaaaaagcacggcgtctggttctcccgcccgggcaacggtatctgccaccaggtgcagctcgagcgcttcggcaagccgggcaagatgctcatcggctcggacagccacacgcccaccggcggcggcatcggcatgctggccttcggcgcggggggcatggacgtcgcggtcgccatgggcggcggcgcgtactacatcacgatgccgaaaatgttcaaggtcaacctcaccggcacgctgcggccctacgtcacggccaaagacatcagcctcgagctgctgcgcatcctgtcggtcaagggcggcgtcggcgcgatcatcgagtggggcgggccgggtatcgcggcgctgtccgtgcccgagcgcgccacgatcacgaacatgggcaccgagctcggcgcgacgacgtccatcttcccgtcggacgacgtgacgcgcgccttcctcgccgccgaggggcgcgaggcggactttatcccccttgcgagcgacccggacgcgcgctatgaccgcatcattgacatcgacctcaacacgctgcagcccatgatcgcctgcccgcacagcccggacaacgtcgtccccgtggaaacgctcgcgggcacgaaggtcgatcaggtctgcatcggctcgtgcacgaattcgtccctgttcgatatgctcaaggtcgcagccctgctcaagggcaggaccatcgccccgggcgtgagcctgtccatctcgccggggtcgaagcaggtgctgaccatgctctctgactgcggcgcgctcacggacatcctcgccagcggcgcgcgcctgctcgagtgcgcgtgcggcccgtgcatcggcatgggtttctcgcccaactccggcggcgtgagcctgcgcacgttcaaccgcaacttcctcggccgcagcggcacgaaggacgcgcaggtctacctcgtgtccccggagacggccgtcgccgccgcgctcaccggcacgatcaccgacccgcagacgctcggccccatgccggccgtcacgctgccggagcagtttcgcatcgacgacagcgccgtgctgccgccagccccggcggacgaggcggacgcggtggaggtgctgcgcgggccgaacatccagcccttcccgcagagcaggccctttgccgacacgctcacggcggagctcgtgctcaaggtgggcgacaacatcacgaccgaccacatcatgccggcgggggcgaagatcctgccgtatcgctcgaacatcccgaagctgtcggagttttgcttcacggtctgcgacccgacctttccggcgcgcgccagagcggccggggacggcatcatcgtcggcggcagcaactacgggcagggctcgtcgcgcgagcacgcggcgctcgtgccgatgtatctcggcatccgctgcgtcgtggccaagagcttcgcgcgcatccatgcggccaacctcatcaacgccggcatcctgccgctgacgtttgccgatccggcggattacgacgcgctgcagcccggcgcgcggctgcgcatcgacgatatccgcaccggcatggcagcggggaaactgacgctcacggacacggcggcgggcaagtcctatcccgtcgtgtgcagccttaccgagcggcagcaggccatcctgctcgccggcggactgctcaactacacaaaggagcatgcactatgaacgatattgaccgcgcctgtgcggcgtttcgcacgctgctgactgagcagcaggcccgcgttgcgggcatgaccgccgagcgggtggactatacgaaaaaagcgaccgtgaccatcggtcttgtcgacggcgacggcatcggcccgatcatcatggagcaggcggtgcgcgtgctcgaggcgctactcgccgatgagatcgcgcgcggcagcatcgccctgcggcgcatccgcggcctcacgatcgaaaaccggctggcctgcaatcaggccgtgccggacgatgtgctcgcggagatcctgacctgcgacgtgctgctcaaaggcccgacgacgacgcccatgggcggcgggctcgagagcgcgaacgtgaagctgcgccgcgcgctcgacctctacgcgaacgtccgccccgtgaccatccccgagcagggcatcgactggacgttcttccgcgagaacacggagggcgagtacgccctcggcagccgcggcgtggagctgcccggcatggccgtggacttcaaggtcacgaccgaccccggcacgcggcgcatcgcccgcgcggcgttcgactatgcccggcgcaatggcaagacgcgcgtgaccgtcgtcacgaaggcgaacatcctcaaaaagacggacggcaagttcaccgccctctgccacgaggtggccgccgactatcccgagatcaccgtcgatgactactatattgatatcatggcggcgaacctcgtcaacgagcgggtgcgcgggcagtttcaggtgctgctgctgccgaacctctacggcgacatcatcaccgacgaggctgcacagctgcagggcggtgtcggcacggcgggcagcgccaacatcggtgaccgctacgccatgttcgaggccatccacggctcggcgccgcgcatgatcgagcgcggcatgggcgactacgccaacccccagagcattctgcgcgcagaggtcatgctgctgcggcacattggccgcgcggccgcggccgaccggctcgaggcggcgctcgacgcctgcccggccgacatcaccggccggccggacggcgcgacctgcgccgactacggcgacgggatcctgaaactgctctgaagcacacggcggcgcgccatgacgggcgcgccgccgagtctgtctgtatccggttcttggcgcagagatgcgtgtcaacgcggaacggaaaatgacggaatttttcgtgcaaaaagacggcgcgcaaagccgccggatttgttgacagaccggacgattatgtgatatcatatcaaaaatttgcgattcggcagaaatgaggcgaggaaaaatggttgcggccgcagagaatatgcagacatttgggtgggatctttttcccggcaaccgtgattctgtttttcttggcagcggcagcattgccggtgacgaacttgatatttcttctttcgtggtattacctggtttcgtagatgtgcatgtacatcttcgtgagccgggtttttcttataaggagaccatttcgtccggcacgcttgctgcggcgcacggcggatacagccgcgtgtgcgccatgcccaatctggatccggcgccggacagtttgcagacgcttgccccccagctggagcgcatccgcacggatgcggtcatcgatgtgacgccctacggcgcgatcaccgcgcaccgcggcggcagggagcttgcggacatggagcagctcgcgccctatgtcgccggcttttccgacgacggcagcggcgtgcaggatgcggacgtgatgcgcgccgcgatgcgcaaggcggcaagcctcggcaagctcatcgccgcgcactgcgaggacaacaccctcctgcacggcggctatatccacgacggcgcgtatgcccgcgcccacgggcacaagggcatcagcagcgagagtgagtggcggcagctcgcgcgcgatcttgagctggtgcgcgagacgggctgcgcctatcatatgtgccacgtgtccaccaaggagagtgtggcgctcatccgccgggcgaaggcgcaggggctggacgtcacctgcgagaccgcaccgcactacctcgtgctgaccgaggacgacctgcgcgaggacggcagcttcaagatgaacccgcccctgcgcacgcaggccgaccggcaggcgctcatcgagggcatcctcgacggcacggtggacatgattgcgaccgaccacgcgccgcacagcgcgcaggaaaaggccaggggcctcgccgggagcgccatgggcatcgtcggccttgagacggcgtttcccgtgctctatacccaccttgtgcgcaccggcgtgctgacgctcgacaagctcgtggagctcatggcggtcaaccccagaaagcgcttcggcttcccgctgcgtgcggacgattatgccgtctgggacctgaacacggagtaccgcatcgacccggcgcagttttgctccatgggaaagagcacgcccttcgccggacagacggtctacgggcggtgcgtgcgcaacgtctgcggcggcgctgtcgtctggcaggacgcgcaggactgagcgcccttcatttacatattaaatatatgacatacaggactttttacgtactgaggaggaaatcacatgcccaagagaacggatctgaagaaaattatgatcatcggctccggcccgatcgtcatcggtcaggccgctgagtttgactatgccggcacgcaggcgtgcctgtcgctcaaggaggaggggtacgaggtcattctcgtcaactccaaccctgccacgatcatgacggatacctccgtcgcggacaaggtgtacatggagccgctgacgctggagtatgtggcgcgtatcctgcgcaaggagcgcccggacgcgatcgtcccgggcatcggcggccagaccggcctgaatctggcgatgcagctcgagcagaagggcgtgctcaaggagtgccaggtcgagcttctcggcacggacagcgacagcatccgccgtgccgaggaccgcgagcagttcaaggagctctgccagagcatcggcgagccggtcatcccgtcgcagatcacctacggcctcgaggaggccaaggccgcggcctcggccatcggctatccggtcgtgctgcgcccggcgttcacgctcggcggcacgggcggcggctttgccgacgacgaggcgcagctcgtcgagctgggcatgcaggcgttcaagctctcgcccatccatcaggtgctgatcgaaaagagcgtcaagggctataaggagatcgagtttgaggtcatgcgcgatgcgtccgaccgcgccatcaccatctgcggcatggagaacatcgaccccgtgggcgtgcacaccggcgactccgccgtcgtcgcgccgatcatgacgctcagcgaccatgacatgaagatgctcaacgacagcgcgatcaagatcatccgcgcgctgaagatccagggcggctgcaacgtgcagtttgcgctcaaccccaagacctcggagtacttcctcattgagatcaacccccgcgtctcccgctcgtcggcgctggcgagcaaggccagcggctatcccatcgcgcgcgtcacggcgaaggtcgccgtcggcatgaacctcgacgagatcgccgtcgccaacacgacggccgcgttcgagccgtcgctggattacgtggtcgcaaagctgccgcgcttcccgttcgataagttctcgaccgccgccaacacgctcggcacgcagatgaaggccacgggcgaggtcatgggcatcggcagcacgctcgaggagtgcctgctcaagtccgtccgctcgctggagatcggcgcgcagcacctctggctgccgaagttccagaacatgaccaaggcggagctgaccgagtacctgcaccagttccgcgatgacgggctctttgccgtcgcgcagctgctgcgtctgggcgcgagcgtggacgaggtcgctgcactgacgatgatcacgccctacttcctcgagaccatccgcggcatcgtggacatggagcagacgctctgcgcgcacaagggcgacggagagacgctcaagcgggccaagcagatgggcttctgtgacccctacatcgcgcggctctggggcgtgcgcgaggaggatgtgtatgcccagcgcgtgcagctggggctctaccccgcctacaagatggtggacaccagccacaccggcgcttacatcccctatttctactccacctatgcccccggcgcaaagagcgaggcgcgccgctcggacaagaagaaggtcgtcgtgctcggcgcaggcccgatccgcatcggtcagggcgtggagtttgactactccaccgtccacgcggtgcagaccatccggcgcgcgggctacgaggccatcatcatcaacaacaaccccgagacggtctccaccgactacacgaccgccgataagctgtatttcgagcccctcacgcccgaggatgtcatgaacatcctgcacgaggagcaggccgatcaggtgatcgccagcctcggcggccagacggccatcaatctggcgcagccgctcatgatgcgcggcgtgcagatcatcggcacggactgcgccgcgatcgagcgcgcggaaaaccgcgactgctttgaaaagctgctgctcgagctgaacatcccgcagccgatgggcgcggcggtgacgaatctggacgacggtctcaaggctgcgcacacggtgggctatccggtgctggtgcgcccgtcgttcgtgctgggcggccgcgccatggagatcgtggccgacgacgagatgctgcgccactatctgcagaatgccgtgcgcaccggcgagggcaagcccgtgctggtcgacaagtacatctccggccgcgaggtcgaggtcgacgccatctgcgacggcagagacgtgttcgtgcccggcatcatggagctggtcgagcgcaccggtgtccactccggcgactccatcagcgtctacccgccgttttccatctccgacaaggtcaagggcacgatcctgacctatgccaagaagctcggtctgggcatcggcattgtcggcctgtataacatccagttcatcgtcgataagagcgaccatgtctacatcatcgaggtcaacccccgctcgtcgcgcacggtgccgtttttgtcgaaggctacgggctatcagctcgcggacatcgccaccaacgtcatcctcggcacgagcctcaaggagcagggcatcttcgacctgtatccgccggaaaaagagcgctgctatgtcaaggcgccggtgttctcctttgccaagctccacgggctggacgcctacctctccccggagatgaagtccacgggcgaggccatcggctacgacaagaagctctcgcgcgccatgtacaaggcgctgcaggcctccggcatgaacgtgcagaactacggcaccgtgttcgtaacgctggccgatgaggacaagcccgagggcctgccgctcgtgcgccggttctatgagatgggctttaacatcgaggcgaccgcaggcacggctgcctacctcaagtccttcggcatccgcacgcgcgtgcgcggcaagatcagcgacggcagccacgagatcctcgattccatccgcagcggctacgtcagctacatcatcaacacccgctccatccattcgagcgtccacgcgcaggacggcgccgcgatccggcgctgcgcggtggaaaacggcgtgaccgtctttacctcgctcgatacggtgcgcgtgctgctcgacgtgctcgaggagacgacgctggccgtgtccacgatccacgcggagtaagccgtgcagcagagagttttcaccattgcggaaaacgcgcccgtcgcccgcgggacgtatcgtctgcgtctcgcgggggacaccgctgcgatcaccgcgccggggcagtttgtggacatccggctcgccggatattttctgcgccgccccgtgtcggtgtgcagctggagtgacggtgcgctgacgctgtattataaagtggcgggcgcaggcacggcacagctgagcacgctggcgccgggcacggagctggacctgctggtcggtctcggcaacggctttgacaccgcacccgccggcgcgcggccgctgctggtcggcggcggcgtgggcgcgtccccgctgtacggtctggcgcaacagctcgtggccgaggggcgcagcccgctggctgtgctcggctttcgcacggcggcagaagtgctgcttgccgatgcgttttgtgcgctcggcatccccgtcacggtcgtgaccgaggacggcaccatgggcgcgcgcggcttcgtgaccgacgcgctgcccgaggacggcacctatgtgtatgcctgcgggccgatgcccatgctgcaggcgctgtgcagcgcgacgccgctcgacggtcagctgagcctcgaggcgcgcatgggctgcggcttcggcgcgtgcatgggctgcacctgcgaaacgacgcacggcagcaagcgcgtctgcaaggacgggcccgtgttcacaaaggaggagatcctatggccgcaacagccgtaacgctctgcgggatcgagctggaaaaccccatcatcccggccagcggcacgtttggctacgggcaggagtttgcgcagctgtatgacatcaatatgctcggcacgttctccttcaaggggacgacgcgcgcgccgcgcttcggcaaccccacgccgcgcatcgccgagtatgccggcggaatgctcaacgcggtggggctgcagaaccccggcgtggacgcggtcatcgcgcacgagctgccggagctgaaaaaggtgtttcacaagccggtcatggcgaatgtgagcggcttcagcgtggaagaatatgccgaggtttgcgccaggcttgacgcgcagccgcaggtcggctggctggaggtcaacatctcctgcccgaacgtccacggcggcggcgctgccttcggcgcggagccgtcggccgcggcggaggtgacgcgcgcggtgcgcgccgtgacgaaaaagccaatcatcctcaagctctcgccgacggcggcggacattgccgccgttgccaaggcctgtgaggacgcgggcgcggacggcgtgagcctcatcaacaccctgccgggtatgcgcatcgaccttgcgcgccgccgcccgctgctggccaaccggaccggcggcatgtccggccccggtatgttcccgctggccgtgcgcatggtctatcaggtgtacgaggcggtgcacatccccatcgtgggcatgggcggcgtgacgagcgcgcaggacgttctggagctgatgctcgcgggcgcgacggcggtcggtgtgggcgcggcaaacctggtcgagccgtatgcctgcaagcacatcattgaaactctgccggacgcgatggcgcgcttcggcatcgacaatctcagggacataataggaggagcacatcatgggtaaggacgttatcattgcgctggattttgacagccgggaaaagacgctcgcatttctcgacctctttcaggacgagaagccgtttgtgaagatcggcatggagctgttttatgccgaagggccggacatcgtgcgccagatccacgcgcgcggccacaggatctttctcgacctcaaactgcacgacatcccgaacacggtgaaaaaggcgatggccgcgctctcggcgctggatgtggatatcatcaacctccacgctgccggcacgaaggccatgatgagcgccgcgctcgagggactgacccggccggacggcacgcgcccgctgctcatcgccgtgacgcagctgacctccacggatcaggagcgcatggaccgggagctgctcatccacgcgccgatcgacgaggtcgtgctgcactatgcacgcaatgcgcgcgatgccggtcttgacggcgtggtctgctccccgctggaggcgggcagcatccatgcgcgctgcggcgcggactttctgaccgtgacgcccggcgtgcgctttgccgacggggagagcggcgaccagaagcgcgtcacaacgccggagcgcgcccgggagatcggctcggactacatcgtcgtcggccgtccgatcacgcaggcggacgatcctgtcgccgcctatcgccggtgcgtggccgcgttcgtcggctgagcgccggatcagagactttttcaacaggaggaactgctatggatatcaaacacgaagttgcgcgcagcctgctctcgatcgaggcggtgttcctgcgcccgcaggagccgttcacgtgggccagcggcatcaagagccccatctactgcgacaaccgcctcatcctgaccgcgcccgaggcgcgtgatctggtcgagcacgccatcgccgagacggtcaggcgcgagtatccgcaggcgcaggtgctcatgggcacggccacggccggcatcgcccacgccgccatcgccgcgcatctgctcggtctgccgatgggctatgtccgctcgcgcagcaaggatcacggccgccagaaccgcatcgagggcaagctcgtcccggggcagaaggtcgtggtcgtcgaggatctgatctccaccggcggcagcgtgctcgacgcggtggacgcgctgcgtgaagccggcgcggaggtgctcggcgtcgtgagcatcttcacctacggcatgaaaaagggcgtggagcggctcgccgcagcgcaggtcagaaacgtgagcctcacggatctggacaccgtcgccagcacgggtgcacaggagggctacatcaccgaggccgacgtcgcgcggctgctggccttccgcgaaaacccctccgacgagagctggatccaggcagaaagtcaggcgtgatatgaagcatctgatcgacattatgcagctgaccccgcaggagatcatggagctcatcgacaccgcctgcgcgatcatggagcaccccgagcaatatgcccacaagtgcgacgggaagatcctcgccacgctgtttttcgagccgtccacgcgcacgcgcctgagcttcgagagcgcgatgctctcgctcggcggcaaggtgctcggcgtcgcctcggcagagagctcgtccgcctccaagggcgagaccgtcgcggacaccgtgcgcgtcgtcagctgctacagcgacatcatcgccatgcgtcatcccaaggagggcgcgccgctggtcgcgtccatgcacgcgcaggtcccggtcatcaacgcgggcgacggcggacacaaccaccccacgcagacgctgaccgacctcatgaccatctaccgcgaaaagggtcggctggacgacctgacgatcggcctgtgcggcgacctgaagttcggccgcacggtgcactcgctcgtcgccgctatgagccgctgcacgggcatccgcttcgtgctcatctccccggaggagctcaagctcccgcgctacgtgaaggacgagtatctcaaaaagcccggcgtcccctacacgcagtccacgtcgctcgaggccgtgatgccggagctggacgtgctgtatatgacccgcgtgcagcgcgagcgctttttcaacgaggaggactacctgcgcctgcgcgacagctatatcctcacgccggataagctcgagaccgccaagcccgacatgagcatcctgcacccgctgccgcgcgtcaacgagatcgccgccgccgtggacaacgatccgcgcgcctgctacttcaggcaggcaaaaaacggccgctatatccgcatggcgctcatgctcaagctgctgggcatcgactgacgggaggagaaacgttatgcttattgattcgattcaaaacgggatcgtcatcgaccacatcacggccggcaaggccatggaactctaccagatcctcggcctggacaagctcgcctgcaccgttgccatcctcaaaaacgtcaccagcggcaagctcggccgcaaggacatcatcaagatcgacggcgagatggagctcgactgggacctgatcggctatgtcgatccgagcatcacggtcaacatcatccgcggcggcgagctgcaggaaaagcgcacgctcaagctgcccgagcgcatccgcggcgtgctgcggtgcaagaatccgcgctgcatcacctcgaccgagcgcgagctgccgcaggagttcgtgctcacggatcgggagcggcgcgtctaccgctgcctgtactgcgagaccgaggcgggaaagtgatcccccggaaaatctgataaaccaagtggcgcgtccgaaaccggacgcgccgcttgtgcttgccgtcaggcgagcagccggatgcttttggtcatcaggatcagcccgagggcgacgatgaggatcgtgctgcccttgagcagatatttgttgtaccgcttcgggagaaacgtcccgagcaggccgaacagaagcatgaagacgtacgtgcccgcgccgaaggcgagcatgctcaccgcgccgcttgcccacgacccggacgaggcggcgaagatccacatcgacgacagcgcgccgcacggcatcaggccggtcagcagcccggcggcgaacgccttgccccggaagcggcagggcctggtcagttcgggactgatccggcgcagaaacggcacgccccacatcctgagcccgatgagcaccacgagcagcccgctgacggtcaggagcataaaggtaagctgccgcccatcttgagcggcagcttgctttttatagaatctactatccctgataccttattctttcaaccagcgtttcctttttcagattactgcttaaaacgagggaaagcacaatttgtagaataccaaccagaagaatcataacaagaatcgggataagaggaacgtgataaacgttcattccaaaaatcccatgatgcttcgcataggaaaacagtgcatagccaaggggcagaccggcagcaagtgcgacgcagatggtgccaaccgtaaaaatccgccgcactcctgctgggagcgcggcggaactttctggcggatagggtgggattcgaacccacgagccgcttgcgcgactacctgatttcgagtcatttcccccttgtgatttttggtggaaatt

SEQ ID NO: 13953 - DNA, 143588 bp, Unknown
  gut microbiota DNA sequence
atatgtttacataatgatatttacataaatgataaataaatataaaaatatactgaaatatcaatattttttcttaattttggttgtcataatcctgtttccataactgaaatagcgcaagcacccatgtcgctccgttgcatttacataattcagtttacataattcaattatatttcatcattcttgctgaaattataagcattttctaagtatttggttttcataatgcagttaccataactgtatattttgcttttctgtttacataacatcgtatttgaatgggaaaaccgcgcaggaatcagcattcctgcgcggttttggttgtcataacaccgaatattttacgcgaccacgtcctcgaactggctgttgtagagcgcggcatagaacccgccgcgcgcgagcagttcgctgtgcgtgccctgctcgacgatgttgccgtcgcgcatgacgaggatacagtcggcattgcggatggtgctcaggcggtgcgcgatgacaaagctcgtgcggccgcgcatgaggtgatccatcgcctcctggatgagctgctcggtgcgggtgtcgaccgagctggtcgcctcatcgagaatgagaatgggggcgtttgccagcacggcgcgtgcgatcgtcagcagctgcttttgtccctgggagacgttcgtcgcctcctcgttgagctccatctggtagccgccgggcagcgtgcggatgaaggcgtcggcgcgcgcggcctttgccgccgcgatgacctcggcgtccgtcgcctcggggcggccgtagcggatgttttccatgattgtgcccttaaagagccacgtgtcctgcagcaccatgccgaaggcgcgccgcaggtcgccgcgcgcatagtcgcgcacgtcgcgcccgtcgacgaagatcgcgccggcgtcgacatcgtaaaagcgcatgagcagcttgaccatcgtggtcttgccggcgccggtcgggccgacgatggcaacggtcctgcctgccggcacgtcgcagctccagtcatggatgaccggctgcgcgggatcgtagccgaagcgcacgtgccggaacgacacgtcgccgcggatgtgctccgccggggcgggcagcgcggggtcggccggctcttccgcctcgtcgaggaaggcgaacacgcgctcagccgcggccgccatggtctgcagttgagtgctgatctgcgccagctgcgtgatcggctgcgtgaagttcgccatgtagttgagaaatgcctgaatgtcgccgatcgtgatggtgccgcgcgcggcgagcgagccgccgagcacgaccacgcacacgtagccgagcttgctgacaaacgtcgtcaccggcgacatgagcccggacaggaactggctcttccacgccgagcggtagagccgcgcgttgatggcgtcaaactccttttgtgtcgcgccctcgcggttgaaggcgcagatgacgttgtgcccggcgtaagtctcctcgaccttgccgttgatatcgccgaggttcttctgctgggcgacaaaatagcgctggctgcgcttgacgatccggcccgtgagcacgcccgtgaccggcagcacgatgagcgcgatgagcgtcatgagccagctgatgcgcagcatcatgaccagcacgccgacgagcatggtgacgttcgtgacaagctgcgtgaccgactgcgccatgccggaggacatggtgtcgacgtcgttggtgatgcgcgagagcacgtcgccgacggtgttgcgctcgaagtagcgcatgggcatgcggtggatcttggcgctgatctcgccgcgcaggcggtaggcgagcttctgcgtgatgccggcgaggatccacgactggaagaagctgcacgccgcgctgacgagatagagcgcgagcacggtcagcaggatcttgccgatcttgccgaagtcaatgccgccgaggcccgagagcttgcgcccaaggccggtggccagctccgtcgtggccgtcgagaggatcttcggcccgacgatgccgaaggccgtgctcgccagtgcgagcacgagcacaagcacaagcggcagccggtagcggccgaggcagcggaagagcttcgtgatcgtgcctttgaagtttttcggtttttccgggatgcggcccggtccgcgtctgggacccgccatggtcacccctcctctccgagttccgcggcgctgagctggctgagcgcgatctcgcggtaggtctcgcaactgcgcagcagcgcgctgtgcgtgccgcggccgacgatgcgcccgccgtcgagcacgaggatctgatccgcgtgcaggatcgtgctcaggcgctgcgccacgatgatgaccgtagcgtcgtgcgtctgtttggccagcgcctgacgcagcgcggcatccgtctgatagtcgagcgcggaaaagctgtcgtcaaacaggtacacctgcgggtgtctggcgatggcgcgcgcgatggacaggcgctgccgctgcccgccggacacgttcgccccgccctgcgccaccggcgtgaggaagtggtgcggccgcgaccagatgaagtcctcggcctgcgccgtggcggcggcgcggatggcgtcggcctccgagacgtcgccgccaaactcgaggttcgagagaatgtcgcccgtgaagagcacgcccttttgcggcacgtagccgagcatggcgcgcaggtcggtctggtgcaggcggcgcacgttcacgccgccgatgctgaccgtgccgccggtcgcatcgtaaaagcgcggaatgagattcagcagcgtcgatttgccgcagccagtcgagccgacgatggccgtgacctcgccgggccgcgccgtgaagctgatgtcgtgcagcacgtcgtcctccgcgccgggatagcggaacgacacgtggtcgaacgtgacggtcgcgtccgcgggcacgggctcggggctgcgcgggtcgcgcacgctcgcgcgcgtgcgcaggatctcgtccacgcgcgtggccgagacctcggcgcgcggcaggagcaccgccacgatcgtgatcatcatgaaggccatgatgatgagcgaggcgtaggtcgaaaaggcgatcatgtcgccgatctgcatattgccggcgttgatacttttcgcgccgaaccactcgatcatgaccgtgacgccgtacatgatgagcgtcatgaccgggcccatgaacgccatggtccggttgacgaacagctgcgttttcatgagcgccgcgctcgcggtgtcgaagcgttcctcctcgtgccgctcgcggtggaacgcgcggatgaccggcagaccggtcagcacctcgcggctgacgaggttgacgtcgtccacgcgctgctgcatggtgcgaaactgcggcatggcgatcttcatgagcacgccgacgagcagcagcatcgccgcgacggccagcgcgatgatccagccgaggccggttttcgtacgcgcgaccatgataatgccgccgaggccgatgaccggcgcatagagcacgacgcgcacgatcagcacgcacaccgcctggatctgcgtgacgtcgttcgtggtgcgcgtgatgagcgaggccgtcgagaacttgtccatctcggcggacgagaacgacagcaccttgcggaacacctgcgcgcgcaggtcgcgcccgatggcggcagacatccgcgcgccgacaaaattgcagagcacggccgccgcgatcatgccgagcgtgagcaggagcattttcccgccggtgcgcagcaggtagctgttgcggatgtggttgacattcaggcccgcgacggcgtactccgtcttgagaaactgcacggccgcgctgtgcaggacgctgtcggtgagcgtgcccatgccgctgagcgcttcctcgccgcgcgcgaggatctcctcgtgcgtgatgaggccgccctgcatctgctggcgcagggcgagcacggtgttcgccccctgctccgacaggcgggcatacatgaccagcggccggatgaagatgccctccagctccggcagctgcgccgtgtcgttgatcgtccagacgccgtcggcatccgtgtaggcggcgctgaccgcggcggcgtcgtcatccgacaaaaacaggcgcacgccgtccatggtcttgtccgtgagcgcgaggggcgcggcatattcgatgccgccgctctggatgccggtgtccacgatgcggctcgtgtacgccggcagcgacagctcgcaaaacgactgcgccacgagcagcagcacgatcagcgccacggccgggatgtgcccgcgcaggtatttcagcacccgcatggcgcgtcctccttctgctcttcatagatctgctgggcgatctcccccgcccggtcgctcaggcgcagcagctcgcgcgtgtccgcctcgcccatgcggcggtagacctccgacaggcacgcgactgcctcgtcgagcgacgtctgcacctcgtgccgcccctgctcggtcaggcgcacgacgacgcgccggcggtcggccgtgtcgcgcgcgcgggtgatcgcgcccttgcgctcgagattgttgagcatggccgcgatgcgcgccgtgctcaggtcgagcagcgtgctcagctcgccggccgtacggccgtccgccccggcattgaggcagccgagcaggcgcatctcgccctgtgaaaagatctggctgaggtcctcgcggcgcgcgtggttgaggatcatcgcgcgcacctgttcgcgcgcgatctgttcaaaaaaatccatgatcggttcgctccgtttctccggctgcggccgggtgaaaaaatggatatttcactaataccgtttccttttaccattagataatacagattccctgccccgatgtcaagtatcacgcaggacattttggtgaaaatgtgcaaaaagccgtccctccggagagggacggctgtcaggcacgattttgtttcagtccgtgggctcgaaggcgcggtcgaacaggtccgtgacctctttcgacggggccttgctgcacagcgacacgacgaccgccgcgatcaggccgcacaggaagccggggatgatctcatacaggccggtcggcgtggacaggaacgcataccacaaagcgtcgaccgcaaagcccacgcacacgcccgcgaccgcgccggaatacgtcaggcggcgccagtagagcgagagcaggatgaccgggccgaacgcggaaccgaagcccgcccatgcgcactcgacgagcgccatgatgccgccgcagttcgggtcagccgcgatgaagtacgcgacgacggagatgaggatgacgatgatgcggcccgcccactgcatctcgtggtcggtggcgtccttgcggatgaccggcttatagatatcggaggcgaaggcgctgctgctcgccagcagctgggagtcggccgtgctcatggccgcggccagaatggccgagagaagcacgccggagatgaacgccgggaacaggcggcgcaccatgtgcacaaagacgaggttctcgttgtcgatctcgccgaggaactcacggccgatcaggccgacgacggcggacatggccagaatgagcacgatccagctgcagccgatgatctggctcttgcgcatctcatgctcggacttgatggacagatagcgcacaaggatgtgcggcatgccgaagtagcccaggccccagccaagaccggaaatgatatccgacatgctcttccagttgaagccgccgccggagagcacattatagtagttttccggaacggccatgaccggtgcgacaaagtctgcacccttcatgacgaacagcgcgaggatcggcgtgagcatgagcgcggcaagcatgagcatgccctggaagaagtccgtccagcacacggcgttgaagccgccgaggaacacatacacgaggatgatggccgtggcgatgatcatggccgtcttggcgctcatgcccgtgacggtgttgaacagcgtgccgcaggccgaaatgctcgaggcgctgtaaacgcagtagaccacgacgaacacgatggccgagatgatctgcaggcccttgttcttggacaggaagcggttggtgagaaactgcgggatggtgatcgagtcgttcgcgcggatggagtaccggcgcagacgcggcgcgacgaagatccacgcgcagaccgtgccgatgagcaggccgacggagatccacaccttgccgatgccgtacagatagatcgagccgggcaggcccatgagcacccatgcgctcatgtccgacgcgccggcagacagcgccgcgacccagccgcccatgctgcggccgccgaggaagtactccttctcgccctcctgatggcggtcacggaagaagaaatacacgccgacgccgatgaccagcgcgaaatacagtaatatggcgatccattcaccgctcgaagcagtgcccatgatgttttgcccctttcattaggaaaccttatataattcccgtaaaaacaatatgtgtgtatgatacgccactttccccgccgtgtcaacaatttcttcatacttttcgggaaaaaagcggcgtttccgctgcaatatcagggaaaatttctgcgcttgactttttggaaaccgcgcgtataatataagataatcttattttaagcgataaagttcggacaaggagcgggtacgtgtgacactgcggcaatatgaggcgtttttaaaaacggtggagtgcgcgagcgtgtcggccgcggcacaggcgctgggcgtgtcccagtcggcgctgacgcagctgctggcggggctcgagcgcgactgcggctttcccctgctggtacgcaaccgcggcggcgtgcacctgaccccggcgggcaaggcgctgctgccggccgtgcagcaggtgtgcgcggcggatgcgcacctgcgcggccgcatccaggaggtgcgcgagcgcgccggcggcacgatccgcattgcgacgttcaagagcgtggcggtcaactggctgccgccgatgatcaagcagtttcaggtgcagcatccggaggcgcgcttccgcctgttcgacggggcgtacgccgaggtggacgcctacgtgcgcagcggcacggtggacatgggcttcatctcgctgccgagcgagctgccgggcgagatcgtgcccgtgtgcagcgaccggctgctggccgtgctgccggcgggccacccgctggcggcgtgcgaggccgtgcccgtcgcggccttcggcacggaaccggtcgtgagcctgatcgacagcacgaaccgcgacgcgctgcgcgtgctcgacgccgcgcacgtgcaccccgacatccgctttcagacggcggacgattacgccatgatctccatggtcgagagcgggctgggcatctgcatcgcgcacgagctcgtgctgcgctcggaccaccacaacgtcgtcgtgcgcccgctcgatcccccggcgcaccgcacgatcgccatggccatcccgccggagagcgagggcaagccgctcgtgcgcacgttcgccgcctttgtgcgcgcgtgggcgcaggccaacccgtgacgggaaacgacccggcccatataaaaaaaccggggcgctccgacgggagcgtcccggtttttgtttctggcgcttatgcgttccaggtctttgtctgctcacgcagccagtcggcccacggctcgatgccctctcccttgagcgcggagatcgggaacacctgaatgttcgggttgagcttcttgacgcgctcgacgcacttgtcgaggtcgaagttgaagtacggcgcaacgtcgatcttgttgacgagcagcacgtcgcagatcgagaacatgagcgggtacttcagcggcttgtcgtcgccctccggcacggagaggatcatggcgtttttcacggcgccggtgtcaaactccgccgggcagacgaggttgccgacgttctcgaggatggcgaggtcgatgttctcggtgccgaggccctcgaggccctggcgcgtcatgcccgcgtcgaggtggcacatgccgccggtgtgcagctggataaccttcgcaccgctggtggagatggtcgcggcgtcaacgtcggagtcgatatcggcctccatgacgccgatgcgcagatcgtccttcagggcgttgatggtcgccatgagggtcgtggtcttgccgctgccgggcgaggacatgagattgagcaggaaggtgtgattgcgcttgagttcttcgcgcagcagatctgcctgccggtcgttgttttcaaaaacgctctttttgatttcgagcacgcggaatgcatccatgatcttacctccagaatgttcacggggttttgtatgccaaaattatagcagtctcgccccggttttgcaacctttttgcgcggggattgccaatgttggacagttcgggtataatggtttaatatcgtgcgaaacccaaggaggcgatggtatgccccaccattccggcgccgagctgccgggcgcgcaggcgctgcggcagatggccgcgcagagcgacagccgcggcctgttttccgaccgcgcgcccgacccggcctatgccggcctgtttttgaaccgcgagctgagctggctgcaattcaaccgccgcgtgctggccgaggcagccgacgagacgctgccgggctatgagcggctgaagtttctgtccatctactgctcgaatctcgatgaattttatatggtgcgcgtcggcgggctgctcgaccgggcgctgctgcagccgtggcacacggagaccatcacgggcctgacgccgcgcgagcagctgcgcgcgatctatgacgagacggcgcggcagcaaaaagattttgaagcgctctggcgcaaagtgacggcggcgctggcaaagcagcacgtggagatcctggactttgaccggctcgacgaggcggacgaggtgctgctgcggcggcggttcgacgcgctgcgcccgctgctgagcccgcaggtgctcgacgccgagcacccgctgccgtttctgcgcaaccgcgagcagtatgtgctcgtgcgctttgcgggcaagcgcggcggcgcggggctcgtgccgacgacgcagctgccgaagttttttaagctcacggtcgacggcgtgcagaagctcgcgctcacggcgccgctggtggcgcactttgcgcccctgctcttcggcgagcggcgcgtgcgcgagacggctatcgtgcgcgtgacgcgcagcgccgacatttccatgcgtgacatcatggacgggtgcgacgcggatctgcgcgccgtgatggagcggctgctgcggcgccgccgccggctcgagccggtacgcgcgcaggtgcagggccgcgtctcggacgagatgcgcgcgctcgcgcgcgagctgctcgggctgccgaagcggcagctgttcgtgacgagcgcaccgacggatctgtcgttcgtgctcacgatgccgggggagttcgacctcacggggctgatgtgtcccgagatcccgccggccaaaaacgtggcgctgcaaaagggcgactactttgcctatctcgcgcagcacgacctgctgctcgcgctgccgtaccagagcatcaacccattcgtcgacctgctgtacgaggcggcggacgacccggacgtcgtgtcgatcaagatcacgctctaccggctcgccggcagcagccgcatcgcggcggcgctggcctacgcggccgagcacggcaagcaggtgcagtgcctgctcgagctgcgcgcccgctttgacgagcagagcaacatcgactactcgcgcatgctcgaggacgcggggtgcgacatcctctacggcctgacgaaatacaaggtgcacacgaagctgtgcctcatcacgcggcggtgtcccggcggcatctgctactacacgcaggtcggcaccggcaactacaacgaaaagaccgccgaacagtacaccgacctcatgctgctgacgagcgacccggccatcgggcgcgacgcggcgaaaacgttcgaccggctcgcacgcggcgagaccgtcggcgagacggaggcgctctggctcgcgccggagggctacaagccgcagctgatggcgcacatcgaggcgcagacgcgcctcggcccggaggggtacatcggcatcaaggtcaactccatgaacgacgcggacgtcatggcgcggctcgtgcgcgcgagcgaggcgggcacggaggtggagctgttcgtgcgcggcatctgctgcctgcggccgggtgtgcccgggcggacggaacacatctcggtgcgcagcatcatcgggcggtatctggagcacgagcgtattttcgtctttggccgcggggaggcacaggaggtgttcatcggctcgggcgacctgctcgagcgcaacaccatgcgccggatcgaggcttttaccgccgtgaccgaccccaacgcgcgcgcggaggtgctcgaggtgctcagcgccatgcggcgcgacaaccggcaggcgtggatcatgcagccggacggcagctacctccgtcccgagggcgcgggcgagccgtttgtcagtcaggcgtatctgcacacgtactttgccgggcgcaccgtcgaaaagcccgcgccccctgccccgcctcagccacgaaaaaagctgccgtggtggcggcggctgtggatctggctgaaaaataattgacgaaattcggaattttggacttgacaagcgcgcaaaagcgcgtataatgtgccttacaatttcacagccttatcaagagtggcggagggaccggccctgtgaagcccgacaacctgcagagacctgcaaggtgccaaatccggcggtgcaaatcgagagatgaggatcttcgccttttccaagcgctccgtcggctgtcggggcgcttgtttctttgcccggcacaacagaaagcgaggaatagcaatggctcatcatctctttacatccgaatccgtgacggaaggacatcccgacaagatctgcgaccagatctccgacgcgatcctcgacgccattctggcgcaggacccgaacggccgcgtcgcctgcgaatgcacggtcacgaccggcgtcgtgaacgtcatgggtgagatcacgaccgactgctacgtcgacatcccgaaggtcgtgcgccagaccgtgcgcgagatcggctacgaccgcgcaaaatacggctttgactgcgagacctgcgccgtcatcacgaacatcgacgagcagagcgcggacatcgccctcggcgtcgaccagtcgctcgagagcaaggagaccggcgacagcgcgctcgacaacggcgcgggcgatcagggcatgatgttcggcttcgcctgcgacgagacgcctgagctcatgccgctgcccgtttcgctggcccacaagctggccaagcgcctgaccgccgtgcgcaagcagggtctggtcgactatctgcggcccgacggcaagacgcaggtcacggtcgagtacgacgagcagaaccgccccgtgcgcgtgcacaccgtcgtgctcagcacgcagcacgccccggaggtggacatggcccagctgcgcaaggacatgatcgagctcgtcatccgcccgaccatcccggccgagctgctcgacgatgacacccgctacctcatcaaccccaccggccgcttcgtcgtcggcggcccgcaggccgactccggcctgaccggccgcaagatcatcgtcgacacctacggcggcagcgccccgcacggcggcggcgcgttctccggcaaggacccgacgaaggtcgaccgcagcgccgcctacgccgcgcgctacgtggccaagaacatcgtggcggccgggctggcccgccgctgcctcgtgcagctggcgtatgccatcggcgtggcagagcccgtgagcgtgctcgtcgacacgcagggcacgggcactgtgccggatgcacagatcgccgctgccgtgcagcaggtgtttgacctgcggccgacggccatcatccgcgacctcgacctgcgccgcccgatctaccgccagctcgccgcctacggccacatgggccgcgaggagctcggcgtccgctgggaggataccgaccgcaccgacgccctgcgcgccgccgtcgccgagacgaacgtgtgattcaaaccgcatgaaaaacctccgcagcttcggctgcggaggttttttcatattcattcgtgaaccggcgaggcggttctctatggagcatatgctcaatagtacgagtgcccccaagtagcgttttcgtaatttgcgaggaagtcggcgttcgcgcgctcggtcggcgagagcgaattgttatcgaacgacgcgccgggcaccgtgccgtgataccagctctgggcctcgaaataggccgcgatctgcggcgtctggaagatgcggccgtggcgtgcaaaaatctcgttgcgggcaaggcagcactgctcccaggtgaggttcgccacgtccgcctgcgtgagccggcgcgcggcgctgtccggcaggatgtagctgccggcggaaggcgtcggcgtggggctcggcgtcggggtcggggtgggcgtcggtgtcggcgcggcggacggctctaccgtcgccgtcacggccggggtcgcggccacgaccgggtcttttggcttgggcttgacgttgagcgcaatgagcagcacgatcagtgccacgccgagcgcggcaaagatggcgatgagcagcgccttgctgcgcggcgcgtcccggtcctccggcgcgggctcatacggcgcatcgtcctcccagccgggcacgggcgggtcgtctgcccagggatcgtcctgcggctcggcttcatcgtcccagtcgtcggcgggggcgctgtcctgccagccggaagggaaatgctccccgtttccatcatccggcggcgcggatgcatcctgctgatcctccggcgggaggatttcattctgtaaatcatcttccggcggcgtctgctcgcccccgcagtaggggcaccagcgcgcatcatccgggatgtctcgtccacagtagggacactgcattggcttcacctgccctttcacacacacaaatcgttttcctcaatgtaccatattcccggccataccacaagataaaaaatgtcccccggtggttcgccgggggacaaagaaaagcctgttaacccgcgatgcgcttggcgcccacgtaattcttcaggtagtagctcgagctcaggtcgctgatgacgacgcagcctgcgccggagctgctgtggatgaactggccgttgccgatatagataccgacgtggccgatgctggagctgttgctcgcaaagaacaccaggtcgccgagctggaggttggccttctcgacataggtgccgttgttattgtagatgctgctggccacacggctcatggaatagccgcagagcttgtacacgtagttgacaaagccggagcagtcaaagcccgaggggctcatgccgccgtagacatacggcgcgcccatgtactgcttggccgtggcgacgatggtctcaccgatggagccgctgggcttgctgccgccgtccgacttcgtggtggtgacgtaggcgctgttgacatagcccttgacgccgttgatggtgacagccgtccagttgccgctcgtgccggtgatcgtcagcggcgtgccgttgttatacgtgccgaggatggaataattcgtgccggcaccggaacgcagacgcacgtcgttgcccttgatgtagccggtctggctcgtagagccgccgccgttatcaggcttggtcgtggtcatgtagtccttgctgacataaccgtccctgccgctgtagctgactttgtaccagttgccgctctcgccggtgatggtcatcttcgtgccggtgttatacacgccgaggatggagctggtcgtactcgcacccgagcgcatacgcacgccggtgcccttgatgtagccggccttgctgtcggccccgccgccggagacatagtccgagcggatgtagccgctcacgccgccgatggtgaccttcgtccagccgttttccgtgccggtgatggtcaggggcgtgccgttctggtaggtaccgaggatggagtagttcgtgctcgggccggagcgcatgcgcacatcgctgcccttgaccgaaccgttggagctgcccgtgctgctgccgccgttcgtcacgcccgagagcgagacatagtccgagtggacatagccggtggtgccgttgtagctgaccttgtaccaggcgccgttgacgccggtgatcgtcatggtcgtgccggagttgtaggtgccgaggatggagctgctcgtgctcgcacccgagcgcatacgcacgtagctgccgttgatcgtgccggtaccgaagctggcatccatttcattggcgcgtttgaggtaatcggaagatatgtagccgacggtgccgttgtagaccaccgtggcccagccgccgctcgagcgcgtggacaccacgacgtgggtgcctgccgggagcgtggagataatgccgtaattcgttccggcgcccgttcggaagttgacggccgtcgtcgtcgtcgcaccgccggcgctcgccgcggaagccgaaacggccagcgtgagcgcgaagagcgcggaaacaacggctgttttcagaaatcgtttcgccatagaatcatcctttgcttagttattcgcaagcgcgcggtccagccacacagccgccacatccatggcgttgtacaggccgtccttttctgtctttttgaccacacggtcgcgggatttcagatccgggtcggtgagctgaagctgcacggagacccgcgtcgccacgtcgaggtccttgatctttttcgtgtcgaggatctgcatcataatgatgtacttgtcagccatgctgccgtaatagagcaggttgtctttccggcgcagcggatggcctttgtagcacagttcggtcgattttgctgccaatgagatacacctccgataccactgttttcgaattgtaacacatttcaatctttttgtcaacaccgcatgccccgcgctgtcgtttcggcgcggggacacgcgatggggcagacatttgcgcggctcagccggcgtcatcggcatcgccgccggtgtcctgcgactggccggagaaattgccgaagataccggtcggcgagccgatggtcggcgtcgggaagctcttggtcggcagatccttgtggatcgactccatgacgagcttccagatctgggcggcggggttgccggagaagttcatatactcgggcatatcgtagccggtccagacggcggccacatagtacggcgtgaagccgacgaaccagcggtcgcagttgttcgtggtcgtaccggtcttgccgccgacgggcatgccggtcaggcgggcctcggtgccggtgccgctgttgacggcgttgcagagcatgtcggccatgttccacgcggtgttggccttgaaggccacgatcgtgcgcgcggggttttcgagcacgacctcaccgctggaatccttgacatacgaatacgtgcggccgtaggtgaacacgccgtcgttgacgaaggcggagtacgcctgcgtcatctcgcggacggtgatgccgttcgtgagctggccgagggcgagcggcgcgtagtcgcagtcggactcggcaaggctcgtgacgccgagcttgtccttcaaaaattcatacgacgcgcgcggcgtgagcttgtcgaggatctgcgcggacacggtgttgagcgagcgctgcagcgcctcgcggatggtgatgacgccgtagttgccgccgccggagtttttcggataccagctcgtgccggagagcttgatgtccggcgaatcgttgacctgcgtgtactgcgtgatgaggccgagctccatggccgggccgtaggtcgcgatcggcttgatggacgatccgggcgggcgcttggactgcgtggcccggttcgtgccgaagttgatggtctttttgtccgtgccgccggacaggcccttgatctcgccggtgtaggggtccatgatgacgatggcggactcgaactgctggccggaggccgacgggcgctgcggcatcttgtcgaggtcggtataaacgtcgtcgatcgcctgctggatgctgggatcgtagcaggaatagacctgatagccgccggaatagagcagcgtgcgcgccgtgtcgcggctgacgcccttctgctcgacgaggtcgttgagcacgtcgttgatgacggcctcggcgtagtagctgtagatggtctgggtggcatcgtcggactcgctgcgcacgaacacgagctcctgcgccacggcctcatcgtactgctccttgttgatgtagccctgttcgtacatctgcttgaggatggtctcctgccgggccttattgttctcgcggctgatgaaggggtcgtattttgaggggttattcgtgatgccgatgatgctcgcgcactcggcgagcgtgagatccttcggttctttgccgaagtaggtctcggcggcggtatagacgccgttgcacccctcgccgaagtagacgatgttcaggtaccactccatgatctcttccttatcataggacttctcaaattcgagcgcctggaagatctcgagcagcttgcgctgcacggtgatatcgtcctgcttggtgaggtttttgatcagctgctgcgtgatggtcgagccgccgaagtcgtttttcatcgacaggaacatgttgatgaacgcgccggtcgtacggtaccagtccacgcccttgtgcttgtaaaagcgcttgtcctcgatggcgacggccgcgtgctccatgtccttggggatgtcggcatagtcgatccagacgcggttttccgtgctcgagaggttcgtgaggttctgccagttgccgtcggaatcctcatacaaaatcgagcttgagagcgagaccgtgaagtccgagagctgcacgtcgagatccgtggacaggcagtttttcacatagtacgcgaagatgcacaaaaacagcagccccgtgacgagcacgatcagcaggatcgtgccgagcacgcgcagcacagcgcccgcgacgctcacggtcgcatccgcggcctgggccgcgcgcggggcggatgatgatggtttcggtcgttttgccataggcagtgacgcacctccctgataatacacattatcgggtcaaaaacccggtcgatattcagcgcataaaaacggttaaatgatattatagcacactctgtcaaccggggatagtctttcgcgcgtttttgtccggcgggtatgaaatgtgcgcgcgttggacaaactttccggtgaaaggagcgaggcatatgaaacgaacgctggcactaacggtcgtgacggcgctgtgcgccgtgtcgccgttcgtcgcgggggcggcgatgtcctccctgcagcagccgggcgcggacgcgccggccacgtcctacgacggcgcgcaggcggaatatatcctgcgggattacgagggctatgtgagcgtgttcgcctccgacgccgaccgcaggccgctgcaggtgaccggcatcgaggtcgccggactgcgccgcgccgaccaggagctgctgcgcggcggcatcaccgtcggcagtcaggagcagcttttgctgctgctggaggatctggggtcgtaaaaggacttgattttacacgccagatggggtacactgaaaccagaacacgatcacaactggaggacaccccgatgagtgaagcattcggcagcgattatctgacgatcgaggacgaggacggcaacgagttcgagctggaagtgctcaacgagtttgagctcgacggtcaggactatctcgcggcgctccccgccgatatggacgaggacgaccccgatttcggcatcatcctgctcaagatcatggaggaaaacggcgaggagctcttcggctccatcgacgatgacgacgagctggacaaggtgtacaattactatatggaagagatcttcgccgacgaggacgaaggatctgacggcggcgcggaggaataagttcccgcgcggcgcatagcatgggaataagtcctgctgtgtgcgtggagcacgactgagtgctcagagctcatttaaacccacatctcttataagggatgccagaacttccgctgcggattgcaggcctcccggccggctgaaagatgccggttggacgttggaagcagagaaacagcagagaggcgacccacctgccttcttgtgcaggttgtaactgggctcacacggcattggcgggctggccggcagcgaaagctgccggcttttttcttgtcggagacaagaaaaaagccagattgcatccgtcgcggcgtggccactgaaaaagccgcgccgcattgacaagcccccgccgccggggctatgataagcctcagcggcacgcgcagtgtgccgaatcctgtccaaacgaaaggtgatccgccatgctccgctttcagaacgattactccgagggtgcgcacccgaacgtgctgcgtgccctgtgcgacaccaacctctgctccacgccgggctacgggctcgacgacgactgccgccgcgcggccgacgccatccgcgcccgcttcgcctgcccggacgccgacgtgcacttcctcgtcggcggcacgcagacgaaccagctcgccgcggccgccttcctgcgcccgtgggaggccatggtcgcggccgacaccggccacatcaatgtgcacgagaccggcgcgatcgaggccaccggccacaaggcgatcgccgtgcccggcgcggacggcaagctcacccccgccgccatcgccgacgccgccgcgcagcactgcgctgcccccggcgtgtatgacgagcacatggtactgccgcgcatggtgtacgtgtccgacgcgacggaactcggcactgtctataccagggcggaactgaccgccctgcgcgcggcgtgcgacgcgcacgggatgtacctgtatctcgacggcgcgcggctggcgcaggcgctcacggccgcgggcagcgacctgcagccggaggacctgtcgcggctgtgcgatgcgttttacatcggcggcacgaaaaacggcctgctcttcggtgaggcaatggtcatcgtcaacgacgcgctcaagccgggcttccgccgcgcgatgaagcgcaacggcgccatgctcgccaagggccgcctgctcggcgtgcagttcgccgccgcgatggcgcacgacctctggctcgagctgggccggcacgcggacgcgcaggcgcagcgcatcgccgccgcgctctcggaccgcggcatcgcaatgtacgtgccctcgccgacgaaccagatcttccccatcctgtcggatgcgcagatcgcgcggctgcaggagcaggtcgcgttcaacacgaccgcccgcgtggacgcggcgcaccaggccgtgcggttcgtgacctcgtgggccacgacggacgcgcaggtcgacgcgctgctggccgtgctggcgcaggtgctggagtaacaccgagaacgacacctcatccgtcgcggcgtaaccgccgcgccaccttctcctcaaggagaaggcaaaaaacacgcccgacgcagatcgcgtcgggcgtgttttcaactttacaaatgttccttctgcatcttcgcccagcggcggggatacttcggcggtgtgggcgccgtcttgcggatgacgacgacgctgtgcgtcacgtccgtgccggggatggtgtagcgcgccgtgcgctcatacgtgccgccaagcttgcggatggcgctgcgcgcctcgtcgagctcctcggcgcagtccggccctttcatggcgagaaacaccccgcccgtgcgcacaaacggcaggcacagctcgcacagcaggtacagccgcgcgaccgcgcgcgagaccgccgcgtcgaactgcccgcgcagctccggcgcctcctcggcgcgcgtatgcaggcacgtcacgtccgtgaggccagtcgcggcgcagacgtcgccgagaaagcgcacgcgcttatccagactgtcgagcagcgtgagcgaaatgtccggctgcgcaatcttcagcggcaggccgggaaagcccgcgcccgtgccgacgtcgatgaccgacttgccggcaagcggctcgaccgtcagcagggcagccgaatcgagaaagtgcagctgcgccacgtcggtctcgccgtggatggccgtcaggttcatgaccttgctgcgctcgtcgagcagcgtgtaatatgtctgaaaacgggccagcgccgccgcgtcgagcggcagacccagcgcggcaaaccccgcgcgcagaagttcgtccatgcttgcctccaaaaatgatcggttgccgccatcttatcacattctcccccgcgcgtccagtcccgggcgggtgcgggtgagcaggcacgccgggtaaagcagacctcttccgccgcatccgcttcgctgcgctcagcaccttctcggtagggagaaggcttggcaccggtcgagcatgcacggtaacgggatcgccatggcgcgtaacggcacaaaagccgcccgcacgggtctccgtgcgggcggctgtgctgtctgtgcagctattatgcgtaaaagacgtggtcgccgatcgtggccgtgtaggtcaggcggctgttgaaccacgaggcgttgcaggccgagggattgatgaaatacaggctctcgcccaccgggtcgtagccctcaaaagcgagcttcgccgcgagctcggcatcctcgtccggcgtgaggctgatgcgcccgtcggccgtgggcgaaaactgcgccacaccgccgcgccggtcgaacacgacctccttgacgctgttggggaagcgctcgtccgccacgcggttgagcacgacgttgccgaccgcgatctgcccgtccatgggctggttgccggcctcggcattgatgatgtggctgagccagtagacatcacgcgcgccgtaatagctctcgccgctctcgagcagcgcctgctcggaggcatcgacgcgcagactggtatggtcctcgctgagcacggccgtgacgccgaagatcttctccagatccgccagcggcagcaccacttccccgtcgagggcatacacgccgtcgggcgcgtagaagcagcggccgttggccgtgtagtacgtctcgccgtaggtcgccgcgatgtccgcgccatcgaccgtgacggtctcggtgtcgccgtccgtgaccgtgtcgctctcgaggccgagcatctcggcgaacgcatccgccgggagccagaccgcatcgtcgagcacgtagcagtagccgccgaagcggtcgtccacatacacgggcgtgtagtcgcaggtgacggtctcggtgtagtcgccggcgtccatgccgacggcgaccgtgcgcacgaccggcgaggtcgcctgcgcggctgcctgcaccgcgagcttctcgtcgtgctcgggcgcggccagggacacatccccgctcacgaccgtctttgccgccggcgcgctgccgtccggcccggcggccagcgccgagctttcaccggcgagccagaaaaatccgcacaataagccgcaaagcaggcagacgacgcacatcagcgacaggcccgacttcacggacaggcccgcttttttcgttcgattcatgacgtgcagcctcctttgctgattcatcacagggcgcaaacatttcaatccacgcgccccgttatggataattatattcatttttcaaaccccacgcaatcggcaaattgcacaaagcgtctttttaagttctgaataatatccacaaaaaaatgcgtaaacaacaaaatatagcgttatatgacaccattatgcgcaagaaattgtgttgtttactttgactaaaaccgtcaattcgacgcaaagtgaccaaaataaaaagatgcaagttcgcaaaaaattcttgcaaacttgcattatgtcaactatttttattatttgaaagaattatgttaatctttttcccgcctcacagcgcctgacgcagcgccttggcaagctgatccgggcaggaggtcagcttgctgccgcagcgcacgccctccatgcgctcgatggcctgctgcaccggcatccccaccaggagccgcgaaatgccctgcaggttgccgctgcaccccccttgcacctcaactttgcggataattccgttctccacctccacccgcatcaggcgggagcaaacacccttcggccggtatgtgatcgtcatgacgacgcctcctttgaaaaattccggtgctcagtatagcagatacggtgacataattccacccccgaaaccatatatattgtggagaatgcaatcggaggtgagcagatatgacgctgcggcaaaaactggcctgcgtggggctgaccgtgttcggcctgcagatcgcatcggctgcggcgggcggcgcgccgctcgcggacaggctgcggctctggctcgacccggagcagctgctgctggcatcggtgcgcatggagctgggtgcgccgccggtggacgcatcccccacaccggaggcggcagcggcgctcagcgcggccacgcccgcgccggccgcgacacccgcccccaccgcggacgccgacgccgacgaggacgcgcccaccacgacggccgacgggctgccgatcgtggcgacgaacatcgcgggcgggctgagcatcaaaaacgagacagacatcgcggtcgatgcggccgcgctgctgcagcagggcccggccgtcgtgctgccggcaggcgaaccgcagatcctcatcatgcacacgcacgcgagcgaagccttcacccccgcggggcgcgacctctatcccgcgagcgacacgtgccgcacggaggacaccaattataatattgtgcacgtgggcgacgtgctggccaacacgctcgcgtccgccgggctgcaggtgctgcacgaccggacgatctacgactacccgagctacacgggctcgtacaaccgctcgggcgcggccgtgcaggagtacctgaaccagtacccgagcctacgcatcgtcatcgacctgcaccgcgacgcgctgtgctcggacagcgtggtctataagaccgtggccgagctgcccgatgccgcgtgctcgcaggtgatgctgctcgtgggcacgaacgcctcggggctctaccacccgtactgggaggagaacctgcgcctggcggtgtatctgcaggatgcggtgaatgcggcgcacccgacgctgatgcggccgatcacgctcgtcaacgagcgctacaaccagcacctcacgcgcgggtcgctcatcatcgaggtcggcagcagcggcaacacgctgcaggaggccatacgcgccgtgcgcctgttcggcgagagcgccggcccggcgctcgcccggctcgtgcagtgaccgggcccgacacggtgcgacatattataataggtataaaaccacccccggcgggcgagaatctccgcagacggagcttccggccaaagggggtgttttcatgcaggtccgcaattacatgaccggcgctgccgccgtgacgcatccggacgagccggtcgtcgccgccgctcggctgatgcgcatgcgcggcatcggcgcgctgcccgtgtgcgaggacgacggcacgctcgccgggatgctcaccgaccgcgacatcgtggtgcgctgtgtctcgtccggggacgacccgggcgccgtgaccgtgcgcagcatcatgtcgcgcgaccccgtgacggtcgaagccggcgcggatatccgccgcgcgatggagaccatgcgcgcggcgcaggtgcgccgcctgcccgtgaccgagggcggcaagctcgcaggcatcctctcgatcgacgacatcgcccgctcgggcaggtgggacatggagtgcgcgcaggcgctgtgcggcatcacggccaatgtctgcaggcggtgaggtgcgcggcgcactgcgtgtccgacgcgcaccctaagccttctccttgtggcctcggccggggcgtgcaaagccttctccttgaggagaaggtgctgagcgcagcgaagcggatgcggtggaaaggtcatggtttcttcagcgccgccggtcgtgcaccgcatatcccacgacatctcatccgtcgcggcgtggccgccgcggcaccggtcatgtgctctccctgcgcatatgcgcaaatttttctcctcccttccggccgcgcggccaccgcgcggccgatcattttgcgcacaaatgccaaaaccgggcgcgggaaatgcagcagaatgcacaatcttgagaatcattcgcaaaaagggctttacaaatgcggtttcctgtggtatcttcatatcagtaataattcttgttactgattttcaaggaggtgcttcgatgcccacacgcaaaaacagcaaaaagcggcaggtcatcctcgaagccctcgcagcgacgaccgcccaccccaccgcgcaggagctctaccagcagctcaagccggactatcccgacctgagcctcggcacggtgtaccggaacctgagcctcttcgccgaagagggcgacgcgatgagcgtcggcgtgttccgcgggcaggagcggttcgacgcccgcaccaacccccacgcgcacctgcactgtgtgcagtgcggccgggtcatcgacgtgccgctgcccggtgagccggaggcgcagctgtgtgccctcgcccagggcgtgacggacgcgcaggtgctcgggtgcagcatcacgttcatggggctgtgcaaaacttgtcagcaagcggacaagggatccgcttccgaataaaacaaccaacgatcgaaatcaaaacatcaggaggaatttgactatgaaaaaatgggtttgcagtgtctgtggttacgtttacgaaggcgagcagccgccggtcgagtgcccggtgtgccatgttgacggctccaagttcatcgagcagaaggctgagaagtcctgggctgccgagcacgtcgtcggcgtgggcaaggcgttcggcgcggacgttccggccgacgtgcagaaggagatcgtcgacggtctgagagccaacttcgagggcgagtgctccgaggtcggtatgtatctggccatggcgcgcgtggcgcaccgcgagggctacccggagatcggcctgtactgggagaaggccgcccacgaggaagccgagcacgccgcgaagttcgccgagctcctcggcgaggtcatcaccgacagcacgaagaagaacctcgagatgcgcgtcgacgccgagaacggcgcgaccgacggcaagttccagctcgcaaagctggccaagcagtacaatctcgacgcgatccatgacaccgtgcatgagatggcccgcgacgaggcccgccacggcaaggcgttcgagggcctgctcaagcgctacttcggcgaataatttccaccaaaacacccaccgccccgggagcagatgctcccggggcggttttttgaccgcgggcggcaaatttcggctgcgagcgctgcgccggaattgacaagccaccggcggaatgctacactgattttatcacatgacagatatcgccgccatgtgacaagtatcgcggccgctgcggcggcagcgaaggaggggaaacaccatgaaatactgcgctcattgcggcgcgcagctggtcgacgaggccgtcgtctgcccaaagtgcggctgcgccgtggcaccgacaaaaaccgttgacccgaacgccagcccgaaatcgcgcctgatcacgctgctgctgtgcatcttcgtcggcgggctcggcatccaccgcttctacgtcggcaagatcggcacgggcgtgctctggctgctcacggccggctgcttcggcatcggcgcgctggtcgacctgatcatgatcgcctgcggcacattcaccgacagcgacggaaagccggtcaccgactggcagacctgaacgctgcgcaaaaaaattgctccccggccggatggccggggagctttttgcacgttttacgggtcgatctcgatgatatagccgatcttgccgctgtagaactgcgggtaacggccggcgggatcgccgatgcagtcgttataataccagccgctggacgttctcgtgatgagcacgtaatcctcggcggcgccgttggtatcgtgcacggacggttcgccggacgcccagttatagaccgggtcaacgttgtccttgacccaggcgagctcgccgctgtcggtacggtgcaggccgatccagacataggtcaggccggactcgtcggccagctgggcgacgcgcgtccacttctcggcgctgtcgatcacgacgaggtggccgcccttggcctcggccgccgcttcggcgtcggcccaggagacatccgccgtgacgactttatacgtcggctccggcttcggcgtcggggtgggcgtgggcgtctcggtcgggacgacggtctcgacggggacggtcggcgtcggggtgggctccgccgtggcgggcgtgccgaacacgccgagcgagcgtagcagcagcacggccagcacggccgcgcagatgatgagcacggtcagcaggatgcccgccttgtgcgactggcgctgctcggccgacggctgctttttcggcttggacggggcgggacggtaggcctccggctttttcacaggcggcttttccggcttcttttccgacttcggcttcgccggggtctccggctggacgggccgcttctcggggcggaatttattcggcagcggctgcggttctggcttgcgctcgggctgcggtttcggctcggtgaccggggtttcctctggctttgcttccggttcggcagccggggtttcctctggctttgcttccggttcggcagccggggtttcctctggctttgcttccgactcgagttcggcctccggctcaatgaccggggcttcctccgcctcggtcttcagctcaaacttcagctcagactcagcttccgcttcgggctcggccgcgatctccggctcagcctccggcacaggcgcggcggcctcctcggcgaggatgtcgagcatcatgcgctcgacctcgctgagctcctgctcgggcttgttgaacatctcctgcgcggtcggcacactgcggcgctgttcggcgtcatactgctcgagcgcggcgcacagctccgccggcgtggcgtagcggtcgtccggcttgcactgcgtggcgcgcgcgatgatctcctgcaggccgcgcccggccttgcgcgccgggggcagcgcctcaccgttcatgcggcggcgcagcgcgtcggtctggtcctcaggcagcggcgcacggtcgtccgggtaaaacggcagacggccgcccgacacgcccgcatacagcagcaggccgagcgaatacacatcggccgaggcgtcgagcgtgccgctccagaacacctcgggcgccatgaactccagctcctcggtcgtccagtccttcgtgtccgtgcgggcgggcgcgccaagaccgaccgtgccgtctgcggcgcggctgatgttgtccgggcggatgccgccgtgatatgtcccgcgctccgccaggatgcggcacagcgcctcggccagcgcggtcagctccgcgcgcgagagcgtctgcagccgatcaccgagcaggcaggcaggatccaatgcgtgtttgtccatgtgatacgcacctctttatgtccgtgttggcatgtttacataactttataaatagtaacacacttatgacgacaagtcaattcaatctgacgtgccgggcacaggtttgttccgcccgaggcggccgaaccagccaaaggtcatcggccagatgccggcggcaaaaatgaccatgagcgcatagcggatgagattggcaatattgtgcccgccgcacagcgcgagcagcggcgctttgagcacggtgcgcaggccgatcgtgatggcgaggccgagcacggccttgagcacctgcgcccaccagacggcgcgcacgtcaaagtgcacgtaccgccggtcgagccagtaggaaaacgtcatgcccagcaccgcgccgagcagcgtgtaggcgttcttgcggccggaggcgaggttggcggcgtccacatccgcgggaaatggccagagctcggcaaagagcagatacgcaaggcccagcacggccatgacgccgaaaagccagtaaagccggttcgggtggctgtcaatgtcccgaaagagcgggtagagcgcaaacaccagcacgagcccgaggccgaacgacacgccgacatccagcggcgtgtgcacgccgaggtacatgcgcgagaacgccgtaagcacgatcacggcggcgcagaccacgcgcagccacgtccgcttcgtccagcggccgaggcagccgaaggaggcaaagacattctgcgtgtgcccgctcgggaacgagtagccggtggcctcggcccgggcgctctcgacgatctggaaattcgggtctttcacccacgggcgcgggatgcggaacaccagcttgagaaactggttgacgatcgtgccgacgaagccgaccgtgagcatatagtacccgcaggacttgctcacgcaccagaacacgatgatggcgacggccatgaacacgatctcgccgccgcagttggtgagcgcgccgagcaccgtgtccaaaaacggtgtgcgcagctttgccagtgcataaagtaactgcatgaaacgtttctcccctctgtgtctgtctgccgccattatagcaaagcgcgccgccggattcaaccgcaaaggaaattgacagcggcggatgacgatggtaggataagggcagaatatatcaaaatggaggcatgtcccatggacatcgaaaaaaccatccgtgccctgaccggccgcggcttcgccgtgcagcacttcgccaccgggcgcgaggcggcggactatctcgacggcgcgatcgacggcacgaccgtcggcatcggcggcagcaagaccatcgaccagatcggcctgtacgaccggctcgccagacacaacaccgtctggtggcactggcgcacgccgggctttgacacgctcgaccacgcgctgaccgcgcccgtgtacctcagcagcgccaacgccatcaccgaagacggccagatcctcaacatcgacggccgcggcaaccgtcttgccgccatggtctacggcatcggcaagacggtgtacatcgtcgcgggcacgaacaagatctgcccggactttgacagtgccctgtcgcgtgcgcgcaacaccgccgccgtgcagaacatgcggcgctttgacggcgaccagccgtgccacacagccggccgctgcctcgactgccgcagcaagagccgcggctgcaacgcgctgctcgtgctctggggacagatgatggacatggccaaggtcgaggtcgtgctcatcgacgagccgctcggcctgtaaggaggaaaggcatgaaggtattcaagcgcatcaagtggagctacgtcgtgctcagcgcgatgttcctgctgctcggcatctatcttgtcgtgaaccccgagacgtcgctggtcatgatctgccgcattctcggcgcggctatggccgtgttcggcgtgatgaagatcgtgctctatttcatccgcgaggtcgagggtgtggccatccggttcgactttgcagtcggcctgttctgcatcatcctcggcgcgctcatgctctggcgcgcgccggcgctgacggacatcctctcggtcatgatcggcctgctcgtgctcgtcgacagcgtctttaagctgcaggtcgccgtcgattcgcggcgcatgggcgcgcactcgtggtgggtcacgctcgtgtgcacggtcgtgtgcctggtgctgggcatcctgctggtgttcaacccctttgacggcaagcaggtgctcacgatcatgatgggcgtgtcgctcatcgtcgacggcgtgcagaacctgtgcaccgtcgtgtatgccgccatctttgtcaaggacgtgaaggccgccgtgcacgacttcgtggacgacgccaccgccgtcgagacgacgggcgaggtcctcggcgaggacgcaccccagtccaagcccgacgaagggccgaaagcgccgtaaggcgttaaattctgcttaattttaccggacgcgggaatttctccgcgtccggctctttacttttttgccactttggtgtaaaaaagaaaatatcttgcgaatcgaagaagtaaggggggagcttccgatgctggagcagaattttcagagtgtgtacgagaagtttaagctgcaattttttcgccgcctgttttcgcaggtgcgcgagcgcgagggctcgctgagcgcgatggaggcgttctccgtcgaggtcatccacgaactcgacgcgccgaccatcggtcagtttgcggattttctcggcatctcgcagtccaacgcgacctataaggtcaacaatctcatccgcaagggctacatcgtcaaggagaactccgacaccgaccggcgcgaataccacctgaagctgtcggacaagttctactgctacaacggcctcatgcagagctacatcgacaccgtgctcgcgcgcatccatgagcggttcacgcccgaggaactggcgacgttcgagcacgtgctggccgtcatgagcgacgagctgatgcccgagtgcgacgtgccgaaaaagtgaccacacgcccggaagaccggcggcagccagattggctgccgccggttttttgtttgcgggggcaggcagagattcctgttggcagtttcggtgatacgccctcggctcccctgtgtaaggggaggctttggcctcaatcccggtcgagcggaggcacaaggacgatcgcctgcgtgcgtgacgtcagggacgccctccgttttcttgtatttgcgggcgaagtgtggtttaataaggaaagaaaacgatagaaacggagcatcgccatgacgatcgcagtcatcggcgcgggcgcgtccggcatgatggccgcgctgaccgccgccgaacaaccggaaaataaaatcctgctcttcgagcggcaggcgcgcgtggggcgcaagctcgccgtgaccggcaacggccgctgcaacctgacgaacaccagcgccgcgcctgaaaactaccacggcgcgcagccggactttgccgcgccggcgctcgcggccttcccgccggaggcggcgctgcgctggttcgccgcgcacgggctcatgaccgtgacggagccgggcgggcgcgtgtacccgctctcgaacgcggccaacagcgtcgtggacgtgctgcgctttgcgctcgcgcggccgaacatcgccctgcgcgcgggcgaggccgtgacggccgtgcgccggcaggggcgcggctttgccatcgagacggaaagcgaaacgatacccgccgaccgcgtcatcatcgcgtgcggcggcgctgccggggcgaaggccggcggcgtgcgcgacgggtataccctgctgcagagtctcggccaccggcgcacggcgctgcaccccgcgctcgtgcagctgacgaccgaccccacttatccccgcgcgctcaagggcgtgcgcgccgacgcgcgcgtgacgctcacgcgcggccgggccatcctcgcgcgcagcgcgggcgaggtgcagttcacggaaaagggcgtgtccggcccggcgatctttgaaatttcccgcgcggcgagctgcggcggcgagggccagaccgtgacgctcgacctgctgcgcgcacacagcgcgccggactgtctggcgtttttgcaggcgcggcgcgtggccgcgcccacgctcccgtgcgaagaggtgctgaccggcacggtgcacaaccgcgtgggcaagatgctgctgcgctacgccgccgtccccggcgggcggccgctcggcgacgtgacggaccaggaactcaaggcgctcgtgcgcgcggcaaagggcttcgcgctgccggtgcgcggcacggagggcttcgagagcgcgcaggtcacggccggcggcatccgcacggacgaatttgaccccgcgacgatgggcagccttctcgtgccggggctgtacgcctgcggcgaggtgctggacattgacggcgactgcggcggctacaacctgcagtgggcgtgggccagcggccgcgcggccgggagggcgtgccgatgatcgcaatttcgaacctgaagctcgcccccggcgcggacgaggcgcagctgctcccgctggccgccggggcgctgaaagtccaaccccaggatatcaccggcctgcgcatccgcaaaaagtcgctcgatgcgcgcaaaaaagacgatattcactatgtttacaccgtcggcgtgaccgtgcgcggggatgagcgaaagctcgtccgccgctgccgcaccgccgcgatcgtgcaggacaagacctaccccatcccccgcatcgcgccgccgcagatgcgccccgtgatcgtgggcttcggcccggcggggatgttcgcagcgctgctgctcgcgcgcgcaggcgcacggcccatcgtgctcgagcgcgggccggacgcgcagacgcgcagcgcgcagatcgcggcgtttcgcgcgggcgggccgttcgacccggagtgcaacgtgcagttcggcgagggcggcgcgggcacattttccgacggcaagctcaacaccggcacacacgatgcgcgcatcggcttcgtgctcgcggagttcgcggcgcacggcgcgccggagcacatcacctacgacgccaagccccacatcggcacggacgtgctcgtcgaggtcgtgcagaacctccggcgcgaggtcatcgaccgtggcggcgaggtgcgcttcggccaccgcgtgacagggctgtccacggaggatggacacatcgcggcgctgaccgtggccgggccggccggtagctacacgctcccggcgcggcaggtcatccttgcgatcggccacagcgcgcgcgacacgtttgaaatgctgcatgcgcagggcgtgccgatggagccgaagccgttttccatgggcgtacgcattgagcaccggcaggccgacatcaacgccgcgcagtacggcgcggcggcggagcgtctgccggcggcggactattccctctcctgccacctgccggacgggtcgagcgcgtacacgttctgcatgtgtccgggcggcgaggtgttcgccgccgcgtcggaggcgggcggcgtgtgcaccaacggcatgagcaattcccgccgcgacggggaaaatgccaacgccgccgtgctcgtgacgctgcggccggaggacttcccggacaaaagcaccctcggcggcatgtactggcagcgcagcatcgagcagcgcgcctttgcgcgcggcggcggcaattaccacgcccccgcacagctggcgggcgactttctcgccgggcgcgcgagcaccggcccgggccgcgtgcagccgacgtaccgccccggcgtgacgtggtgcgacctgcacgacatgctgcctgcgtgcatcacggacaccctcgcacaggcgctgcccgccttcggcaggaagctgcgcggctttgacgacccggacgccgtgctcacagcgcccgagacccgctcgagcagccccgtgcgcatcgtgcgcggggaagatcggtgcagcaccggcgtgcccggcctctacccctgcggcgagggcgcgggctacgccggcggcatcacgagcgccgccgtggacgggctgcgctgcgccgagagcgtgctcgctgcgctgcaaaacgaagcatgacctgtgccgaacggcacatcctaatatctataaggaggtttccacgatgaaaaacgaagcgtttgcacccacgccggagctgctggccaaaatggacgcctggtggcgcgcggcgaactatctgtccgcctgccagctctacctgctcgacgatccgctgctgcgccggcggctgaccgagcgcgacatcaaaaagaagatcgtcggccactggggcaccgtgcctggccagaacttcatctacacgcacctcaaccgcgtcatcaacgaatatgacctcgacatgatctacctctccggcccgggccacggcggcaacgccatggtcgcgcaggactatctcgacggctcgtacaccgacgtgtacccgaacatcacgcgcgacgaggccggcatgcagcgcctgttcaaacagttttcgttccccggcggcatcccgagccatgtcgcgcccgaaacgccgggctcgatccacgagggcggcgagctgggctactcgctcgcgcacgccttcggcgccgtgatggataaccccgatctgatcgccgcctgcgtcgtcggcgacggcgaggccgagaccggcccgctcgccaccgcgtggcacggcaacaagttcgtcaaccccatcacggacggcgcagtgctgccgattttgcacctcaacggcttcaagatcgcaaatccgacgctcttttcccgcatcagccacgaggagctcgagatgttcttccgcggctgcgggtgggagccgcgcttcgtggagggcgacgaccccgccgagatgcacgccaaaatggccgagacgatggactgggccatcgaggagatccacgccatccagcagcacgcgcgcaccgcgcacgacaccacgcgcccctactggccgatgatcgtgttccgcgcgccgaagggctggaccggcccgaaggaagtggacggcaagcaggtggaagggtcattccgcgcgcaccaggtgccgatcgccatggacaaccccgagcacctcgtgcagctcgaggagtggctgcgcagctaccaccccgaggagctctttgacgacaacggcacgctcatccccgagctgcaggcgctcgcgccgaaggggcagcgccgcatgggcgcgaacccccacgccaacggcgggctgctgctgcgcgagctgcgcatgccggacttccgcacatatgagcagcccgtgccggcgcccggtgccgtcgaggcgcaggacatgaccgtgctcggcgcgttcgtgcgcgacatcatgcgcgagaacatggacgcgcgcaacttccgcatcttcgcccccgacgagacggcctccaaccgcctgagcccggtgttcgaggtcacgggccgccgctgggtcgccgaggcgacggacaacgacgagtttctcgacccggacggccgcgtcatggactccatgctctcggagcatatgtgcgagggctggctcgagggctacctgctcaccggccgccacggctttttcaacagctacgaggccttcatccgcatcgtcgattccatggtcgcgcagcacgccaagtggctcaaggtctgcaaccagctgccctggcggcaggacattgcctcgctcaactacgtgctcgcctcgaacgtgtggcagcaggaccacaacggcttcacgcaccaggaccccggcttcctcgaccacgtggcgaataagaaggccgacgtcgtgcgcatctatctgccgccggacgcaaactgcctgctcagctgctttgaccactgcatccgcagccggaactatatcaacgtcatcgtggcctccaagcacccgcggccgcagtggctgaccatggagcaggccgtgcgccactgcacgcagggcgtgagcatctgggagtgggccagcagcgaccagggcgcagagcccgacgtcgtcatggcctgctgcggcgacacgccgacactcgagacgctcgccgccgtgaccatcctgcgcgagaagctgccggaggtgcgcgtgcgcgtcgtgaacgtggtcgacctcatgaagctccagccgcacgccgaccacccgcacggcctcacggacgaggactacgacctcatcttcacgaaggacaagcccgtcatcttcgccttccacggctacccgaagctcatccacgagctgacctacacccgccacaaccagaacatgttcgtctgcggctacgtcgaggagggcacgatcacgacgccgtttgacatgcgcgtgctcaatgagctcgaccgcttccacctcgtcatcgacgtcatcaagcgcctgccccagctcggcaaccgcggcgcctacgccgtgcagcagatgcgcgacaagctcgtcgagcaccggcagtatatcgccgcgcacggcgtcgacctgcccgagatcgccaactggcagtggaccggcagcaccagcgccgccacgagctccgagcgctgagactgtcgaaaaaccccggagggttttccgacaaagggcttgcacttttttgccgcctgtaggcggcaaactctgcgaggctttttggcacgctgcgccgcccgccccggatggagcgggcggctttcttttccattccacccggccgatttttccgttttccggctgcaaaacacaccgaatgactcggcgcactccgcgattttcccgcgaaagcatccgcttttctgcccagaaaagcagggaaaattttgtgcaagtccacagtttttcgtcaattttcatgttaaaatttagattttccgtttctcccttgtggaaaatatgcaattccgctataatagtgccttgaggtgattttcatgttcaaaatcgtcaataacgaaagattatctgacaatatgttccgcgtcacgttcgaggccccgctcgtcgcccgcaaggcacagccgggtcagttcctgatgttccgcgtcgacgagttcggcgagcgcatgcccatcacgatctcttcctacgatcgtgaggccggcaccgtgtcggtcatcatgcagcgcgtcggcagcacgacggccctgctcgccagcaagaaggccggcgactatgtggccgacgttgtcggcccgctcggcaaccccgccgagtttgacaacatgcacaaggtcgtggtcgtcggcggcggctccggctgcgccatcgcgtggccgcaggccaaagaggcgcaccgcctcggctgcgatgtcgacatcatcgcgggcttccgcaccaagggcatcgtcgtgctcgaggacgagatgcgcgcctgctgcgatcatctgtacatgatgaccgacgacggcacctacggcgaaaagggcttcacgaccgtcaagctcaaggagctgctcgagaaggccaaggccgagggccagcagtacgaccactgcatctgcatcggcccgctgccgatgatgaagttcgtctgccagatcacgaaggaatacggcgtggccacgatggtcgatatgaactgcatcatgatcgacggctccggcatgtgcggcggctgccgcctgaccgtggacggcaagatgaagttcacctgcgtcgacgggccggagttcgacggccacctcgtcgattttgacgaggcgatcgcccgttccaagatctatgaggcacaggagcagaaggtgttcgagcgccgccaccactactgcaatctgcaggccatggccgacgccgaggaagccgcgcagaagaaggaggagaagtaatcatggcgaatatgtctcccaaaaagaatccgatcccggagcaggacccgaacgtccgcaataagaattttgaagaagtcgcgcttggctacaccgtcgagatggcggtcgatgaggccaaccgctgcctgaattgcccgcgcccggcctgcatgtccggctgcccggtcaatgtcaagatcccgcagttcatcgcccgcgtccgtgagcaggacttcaagggcgcttaccacaagatcctcgaggacagctccctgcccgccatctgcggccgcgtctgcccgcaggagaagcagtgcgagagcaagtgcgtgcgcggcatcaagggcgagcccgtcggcatcggccgtctggagcgcttcgtcgccgactggaaccgcgagaacgccgacgagatgcccgagaagatcgccacgaacggccaccgcgtcgccgtcatcggctccggcccgtccggcctcgcctgcgcgagcgacctggccaagctcggctacgacgtgaccgtctatgagcacttccacaaggccggcggcgtgctggcttacggcatccccgagttccgtctgccgaaggccatcgtgcagaaggagatcgacaagctcgtggccatgggcgtcaacatcgtgtgcgacgcgaccatcggcaagtgcatgagcatcgacgagctgctcggcaaggacgccgaccacctcctcggcgacgacaagtacgaggccgtgttcatcggctcgggcgccggcctgccgaagttccagaacatcccgggtctgagctactgcggcgtgttctccgccaacgagttcctcacccgcatcaacctcatgcacgcttacgacgagcgctacgacaccccgctcatgcccatccacgtgacggccgtcgtcggcgcgggcaacgtcgccatggacgccgcgcgctgcgccaagcgtctgggcgcggacgtgacggtcgtgtaccgccgcggcgaggaggagatccccgcccgcaaggaagagtacgagcacgcgaaggaagagggcatcaacttccacctgctgtgcaacccggtcgagatcctggccgatgacaaaggctgggtgcgcggcctcaagtgcatccgtatggagctcggcgagcccgacgagaagggccgccgccgtccgatcgaagtgccgggcagcgagtttgagatggcctgcgactccgtcatcatggcgctgggcacctcccccaacccgctgctgcgcaaggcgacgccggacctcgagtacagcgaccgcggcggcatcgtcgtcaaggacgacaccgtgacgaccatgaaggacggcgtgttcgccggcggcgacgccgtcaccggtgcggccaccgtcatcaaggcgatgggcgccggcaagaaggccgccgctgccatcgacgcatacatcaagagcaagtaagtgcatacataagatcagcgggcatccgtcggatgcccgctgattggttttcaaactggtagccttccccttcgggagcagtacttggggtgcggaacaggcgcgcaccccttggctccttgtggaaagggcgctggcagccgtcaggctgactgagggattgacacgttgattcttgcactggcttcgtatctgcaccccctccgtcacggcgcagagcgccgtgccacctccccttacgcaggggaggcttttcctgcgcgaccggtagtgcaaagcggatctgtcctgaggggcacacacatcagaaaagccttcccatgaaagggaaggcttttcatttccgtcgtttatgcctgcgcggggagattgagcacaaaggccatgaactccaacggctccgggccgtcgttgcgcagggcgtgacgctcgccgtcgcccgtgaaggtcacggtgccggcgtccacggtcgtcgtctcgccgttgctgcggtaaacaccgtgcccggagaggaagtagtacacttcgtagttgccgtggtgggtgtgctcgccgacttcgcagccgggctgcagcaccatgcgggcgcagaccgtgccggcgccgagcatctcctccggggagaggagcgcatagcgctcaaggtggccggcgccgcccttgaggtgctcaaggcgctcgggcgtgtcggggagcttgcggatgaatgccatagagatcagcctcctgtttcgtttctgctctattcgtagcacacggccgcgaaaattgcaaccgtttttcgcgcggaggccggctgggaatcgcattttaaatataaaaaatccacgcacatggcgtggcgtcatccggctctatggcttctcacttgctgctgggctgccagttgctgcccgagaagatcaaatcgtccaggtcctggacttggttggtacgcataacgttatcacgctcctttctttttcagttacttatagtttaccagagaaaatgcaagattacaagcgaatgttttcacaattcctacagcttttgcctaaaattttgcagcaaaacgcacaaatccggggcacttcctgcaggaagcgccccggtcagattcatttgtacaggtcgaggaactcctcgaggcagaggccgttgcccatgatgtacgcagccgcctccttgccgacgtagcggaagtgccacggctcatacatgacgccggtgatgtcctgcttgtcggcggggtagcgcaggatgaagccgtagtcctggcagtgggcgtacatccactggtagagcgcggtcttttcgagctccttcgtcttgacctcgtagaacttgtccgtgatgtcggcgcacaggccgagctgatgctcgctcgtgccgggacggttgacgatgcgggcggccgcagcctcgtcgccgccgcactggctgaccttgcggttaaagagatatgtctgctcgttatagctgcggtacgcgctcgacaggcacacgctcagcccctcggcgcgcgcgccggcgatgaaatctttcagcgcgtccacggcgcgggcgtcaaaataccggccactctcgagctcggccagatcctccggcacggcctcgccgatggaattttgcgcattgacgagcgtgagctcccagctgccggtgttgaccttcggcaggccgttatccggctcgggcgtgggggtgggcgcgacggtcacgaccggggtgggcgtggcggcggcggactgcgccggggcattcatcggcggcagcacgcgcagcgcgatgaccacggccagcgccagcacaagtgcgacgcacaagacggttttgagagcttttcgcatatccccacatcctcggtgacaggtttcggcacatagtgaccaaaaatatggtatcacgtttccggcggcgggtcaatcccaaaaccacgacagcgggccgcagccctttccaacgagaacccatctcattggaaatatcattctccaatatacgtgaagcggcggacggtctgcccaccgcgctcgatcatctcgctccacatggcggcggggcgcacccacacgccgcgctccccgtagagcgcgcggtagacgaccatcggctccaatgttcccgagtgcgtggcgacaaagagcagctcgtattccttccccttgaagtgccggtagcggccggggcggagcgtctgtgccgcgctcatgcgttgtcctccggcaggccgaagctctggatgagcaggcgcgtgagcgcgtgcgccccgtcgcgcgtgagcatgatgctcgcgacctcgccgaccgtcttttccggcatgtcgatcagacccttgggctggggcgtgtaattgtgctgcatatacatatggtaaaagctcagcgagcactccgagcggttgtcattgaccgagacgttgaacacattggcaaactggggcttcatgatgcgcacctcctgcagattttctgcgcccattataccacagcggcgacggaaacgggtgggtgatttttgcacattatcgggaaagatgttcaaaatctattgcggtatgggacaatttcctgtataatgtgtctaccagtatgcgacttttttaacatggaggggagagccgtttgaaagacctgaagtatctttacgaatttgaaaagctgctcgagagcgcgaacaacccgctcgtgcagcaggcgtgtgccgaggggaagcacgcgctggcctacacctgctaccacatgcccgaggtgctgctcaacaccggcgactgcttctcggtgcggctgcgcgcgccgctgacgggatcgctggacatctcgtcgtactacatgtccaacttcatctgcgactactgcaagtcgctgctcgagcgcggcatcgaggggggctacaacttcctgtccgccctgctggcgacggagacctgctcggagatgaaccgcgcgctcgagcacttcgagctgctgcacctcgtggacaacgagcagtttttcgtgaccttcctcgatatgcccttcaaggtcacggacaataccgtgcgccactatgtcgaccagctccggcgcaaggtgctcgagccgctgcatgaggtctacggcgtggacgtgtcggacgacgcgctgcgcaaggctgtggccgagcacaacgaggtctgccgcatcctgaccgagatcggccagctgcgcaaggaggaaaacccgcgcatcacaggctacgagtaccacattctcaacctcgtgagctactgctgcccgaaatacctcatcgttgataagctgcgcgagacgctcgaggagctgcggcaccgcgagcccgacgctaggccgaacttccgtgtgaagattgccgtcgtcggcagcgagatcgacgaccccggctttaccaagctcgtggaggaggcgggcgcgctcgtcgtggtcgaccgcttctgcttcggctcgacgcccggccgcgaggaaattcatctcgaccccgacctgccggtgctcgagagcatcgcccggcactacctcactacgagccagtgcccgcgctacatgcagcgcgagaaggtggagggccgctggcagctcgtgcgtgacctgtgcgaggagtaccacgcgcagggcgtgctgtacgaacagctcaagttctgcgagtactggggctatgagcgcgcgctggcgagccacgtcatcacgcacgactacggcatcccgtccgtcgcggtcgaccggcagaacgccaccggcggcaacggccagctgcgcacgcgcgtgcaggcattcgtcgagagcctggagatcaagcagctccaggcgcagagaggaggcaagtgaccatggctgacaaggaaaaacgctccctgcgggaatttctccgccacatcaatgactatacttaccgcttcaaccccgagaagggccagtttcgctaccgcgagctgcgcggcgtgcgcgacacggcgttcgatttctacatgtggctcaagtgctggaaggacatggtcgcctttgtggccaagtgcccggtgtcggccgtgcgcgcgctgtttcgctaccagtggtttgcgacctatctgacctacccgaactttgtcgaccgcggcacgctcggtatgcgcggcaaccagctgcgcatggcccgcgcgcagtacgaccgcatcgtgaaaaaggccaccgacctgctgcgcatctcgttcgtggccgacgagcacttccaccccggcaacaagctgtccaagaaggtcgtgctctttgacgagctcgtccccggcgagatcatggccggcttcccgaacctcatctacctgccggcgcaggtgctgccggtgtttctgtgctccatcctcgaccagcagatcaccccgccgtacctcgacgcggccgagaacttcggcatcccggccgacgtctgccccctgccctcggccgaggccggctgcgccctgcgcgacgagtatcccaaggtcggcacgtgctttgtcgcctgcaacatgccgtgcgacggcagcgtcgccacgacgtcgtatcaggaccggtacttcaacctcccgacgtactacttcggcgtgcccatccgctacaatgaggaggccgtacaggactacgccgtcgaggagctgcgggggctcatccgcttcatcgaggagcagaccggcgagacgttcgactgggacgcctttttcagggccatgaaggtctacaatcaggagacggagtacgagctgcagaagtgggaggtcaaccgcacgccctacccgcagatgacgggcgagacgttctggatctaccgcatgtttttctaccacctctccggcggcatggacccgcattttctcgacaccgaccgccgcgtcaaccgcatcatgatgcgcggctaccagcagaaaaagccctgcgcgcccgcgatgcgccaccgctgcgtcgagtggtcgtgcccggcgaacttctaccccgacttctctgtctgggcggaaaactgctggggcatcaacgtcgtggcgagcatggagtcgctcatttccgacatcatcatcaacacggaagatcccgatcaggcgctcgccgacctcgcccgcagctaccagcgcaccaccatgcgcaagcacacgaagggcggctacgcgaacgtgctcgacgagctgtggatcgtctgcaaacagtacaacgccgacatggtgctcatgtacgaccagatctcctgcaagggcatggacggtctgcgcggcgtgttcgaggagcaggcggccgcgcgcggcgtgcatatgctctgggtggcgcaggatctgctcgattcgcgcacgatctccaagcgtgacatgcgccgccaggtcaacctctacatgcagaccgtcatgggcgaggagcccgtgcggcccgacctcgtggactttgacgacgcgctgacgtggtaagccactccaacgcaccctttaaaacaggaaaatgccctgccagaaggcagggcatttttgcatatttttcatgcctgcggctgttttttgatatcaaaccgccacacggcgacggcgtaggacacgaaggcgatggcctcgatgaccatgcacgagtacgagcgcgcaaggatatcatacgtgaaccagaacggcgaattcgtcaggtagagcaggcgcgtgcggcgcatatcgcgcgtccagagcgcgaccgtcgtcatgctcatggcgatgccgggcagcaggctcatcggccccgcccacgtgaggacggtattgaccacgtacagcgccagaaacgcccacagccacgcgcggctctgcgcccacttgcggtcgttgaagtaaaacacgacgctgcgcgcgaacgacaggatgttgatggtcgcggcggtcgtcgcaccgagcagcccgtagtgcacgatccacatcaggcaggcggcggcctgcgcggcgaggatgacgcggcggttattgaattgtaccgaagcaaacacgatcaggctgccgagcagacccagcgcctggttgagccagaaacccatgtgcccacaccctttcttcccgcgggaaagagtatcataacacaaccgcgcgggaaaaacaaccctccgcgcgcgttttttctctcccgtgcagcggctgcagggcgtcggcatcggcacggtcgtgtcggcgctgatcgtcgggccgctcgtgtcgctgttcggccgcgtgctgccgggcctcggccgcatccgcgcgctggccatctcctgaatatgcaaaaaaaacaccccgccgcgaccggcggggtgtttctatatttaaatggtatcgctcaaaaccacgcggtgatctgctgccagaccggcaggctgaccagccagcggatgagcggcacgaacagcagcgccggcaaatagtccgccaccttgatcttcgtcgcgccggtctgattgaggccgatggccgccacgagcagcgaacccgcgcacgtgaggtctgcgaccgccgcctccgagagcagcggcgcgatcgccccggccagcagcgtgagcgccccctcgaccacgaacaccgccgcgcccgcgagcatgacgcccgcgccgagcgttgtggccagcatggcgcaaaagacaaggtcgatcatcgacttggtgagcaggatgctgttgtcgccgcggatgccggcatcgagcgagccgttgaccgccatggcgcccacgcagcacagcaggctcgccgtcacgaagccctcggccagcgacgggccgccctcgtgccggtgaacgtgcgcctcgacccacgtgccgagacggtggatcgccccgtcgatgttcagcagcgcgcccgcggccgcgccgagcgtcatggccacgatgacgatgaggatgctctggcacgcaaacgcgcccgagatgccgatatacagcacgcacagcccgaggccgatcatgaccgtcttgctcacgcgctcggggatgccccgctgaaacagcagaccgaccgcaccgccggccacgatggccagcgcgttgacgatggcgcctgtcatgctcatgaatatccgctccttcccgccgcgtccgccttatttcgtgtccgccttatttaaataaggtatccataccgggcacggcgcacctgcaaatgtaccgctctacgatagcacaaccgccggcggtgtaaacacccaaatgcggcaaattcagccgcgcggtgggatcctggacgctttgagctcattcaaaaacagctgcccggcagtggacaggccagtcttctgcttatagatgacgccgatggtgcgctgcagctccggagagagccggcgcgcggtgaggcgctggccgctgcggcgcagcacggcctccggcaggatggacacgccgagccggctctcaaccatgttcaggatcgtgtagtcgtcggccacgcggtactgcacgttgatctgcggatggcgcgcgagcagctcgcggatgcagccgccgccgcgcccctcctcaaggaggatgaagggctcggccgccagctcatcgatctggatgaagatgttctcgcccagcggatggccctcgggcaggacggcgagcatggtgtcctgatagatcggctcgcaggcaaacggcgtcgtgcgcgacatgtccgtgaagccgaaatcgaccacgccctcgcgcacccagtcctcgatctcgtaatacaggccctggtagagctcgaagcggatgcggctgtgctgccggcggaagcgctccatggccggcggcagcaggaagctcgacacgctcgtgaacgtgccgaggcggatcgtgccctgctccagcccactgaagcccgccgcctgcgactggagcatgcggtaggcgttgaccgtgtcgcggatgtacggcagcaggtggcggccctcgtaggtgagcgtcacgcccgagcgcgaacgcaccagcagtgtcacgcccagctccgcctccagcgacttgatcatctggctgacggccgactgcgtgtagccgagatcgcgcgccgcgtccgaaaaactgttgcgctcaaaggccttcaaaaaggcgatgtatcggttcataagcacctcacaaattagaaacgctaatttaactatcagaaacatttgctttacttatccataaaggcattatataatgggcactgtcagatagcaagcgggaattttcgtgaccgcacacgagcctctccgcccgctgacaaaacacgcaatctctcccccaagcaacatgataattcctttttccaactccatttctcctatggaaacgtccctgccggtttgtccgttccggcaggggcgttttccgttttgcgggagatttgcgtgggcaagatatttgtcagatttaccccgcacgaccggcgcgctgccaatgcctcccccgtgcaaggggaggcggcaaaaatctccgatttttgacggaggggttgtgaataccggctgcggtgtaagattttgacgtgtcaatccctcagtcagcctgacggctgccagctccctttgcacaagggagccaagggtgcgggacggccgcgccggggaaaacgataacgccactaacagacaaagcggccctcccggatcgggagggccgcttttcacttgagatcatgccacggcggtcaatccacgaccgtgacggccacggtggtggccgcggcgatggcgtccgcctgcagggcgtcggccgtgacggtctgcagcggcagactgccgagcgccgaccagtcgagcgtgccggaaacgccgcgcaccgtcagctccgtgagcccggtgaaatcctccagcccggacgtgctgtccagctcgcagtcggtgagcgagagcgccgtgagcgcccgctcgcggtcgaagctgtggaagaaatcgccacgcagatcgcagtccacgagcgtgacgcgcgtgagcgaggacttgtgcagcgggatcagcagctcgcggcgcgtgcagtgcgagagcgtgacgtcctgcagcttcgtgagcgcgcgcagctcggacagatccgacacattcgcgccgttgagactcagcttccgcacgttcagacagcggccgaggccggtgaggtcggtgacggcgttgccgtcggccgtgagggccgtgagcttcggcagctgctcgatgcccgacaggctcgtgagccggttggcgctgacatcgaacacctccacaccgcaggcgggcaggctctcgagcgaggtcagcgactgaaactgcaccgagaccgccgtcaggctcggaaaatacgcgaggtcggacaggtcgcggatgtcgccgcgccgcacggtgacggtctggccggaggggtcgatcatctccgccgtctcgacgccggcggccgccgcgtccacgccctgctgcggggcggcgaaccagtaccggtcgccgcagacgtacagcgccgtgaggcccttgaggtccgcgaccgtgagctcgcccgcgggcttgccggcatagtcgcgcgcggcctgctcgagcagcgggttctggaactgggcgaccgtgtcgtccgcgagcgtctgcaccgcgacggtcttgaccgtgaagcggtagagcaggcccgtgaagtggccgacgatgccggccgcgatcaggcagccgacgagcacgacggcgatgatcgccgccgcgaggccgcggcgtcttttcttcggccgcgcgggcttcggcgccttgggcggcttttcgcgcctggcccggcggggagattcgccgcggggcgttttctccttcgcctttttcgcgggcgcgggcgcgtccggcagctccggcggctcgccggcgaatttgcccgcatcgagcagctcggccgagaagagcttgtcgtagaaatattcctcgctcggataggtatacttcatgagcgcgaagaggttgccgatctgcatctccatgccgggagagagctccgtcggctcgaggtagacgttgatgacgggcttgcgcttggtcagggcatagtgcatctccttgcggcagttgtccgagcgcaggtacgccggggacaaaaacgccagcacgagctgcgcgcgctcgagatgcgacgcgatgctctccggccactcgctgccggcctcgatgccctcatcgtaccagacgcgaaagccgcgcgactgcaaggtgctgatgatctcgaggacggccgcgtcgttcttgtgcgcgtagctgacgaagagatacggcagcgtgccctcataggggcgcagaagggtcttcaaggaaccacctccggaaaaatttcaaaaatggactggattttgttcgtgtatcacacacattcgtgcccggcaagggctttgagcccggcgaggtacgcatacggcacgcgcagcccgccccggccggagccgagggcgatgtccggcttgcgcaggccgtggtagtccgagccgccggagggcgcgaggccaaagcgcgcggccagcgcctgcgcgatctccgtctgctcgggcgtataggtcgtatagcgcacctcgacgccgagcgccccggcgtccgccgcagcggcgagcatggcggcgcgctgcgcatcgtcaaagcggtacttgaagatgtgcgccacgaccggcacgccgcccgccgcgcgcagggcgcggatggaatccgcgagcgggatgttatagcgcgggacgtaaaacgccttgccccggccgagcaggccgcgcataccgtcggacaccgaggggatgcacccgtgctgcacgagcagcgccgcgatgtgcggccggccgagcaccgtctgccccgggaaggccgcgtgcaggtcgtccatcgtgatggggtagcccgcgtcgtgcaggcgctgcaccatggtctcgttgcgggcattgcgctcgtcggtcgcgcgggtcatgagcgcgcgcagcgcggcattgcccgtgtccatgaagtagccgagcaggtgcacctcctcgccgccccagacggtggacagctccacgccgggcacgacctcgatgccgcagcgctgccccgccgcgagggcctccggcaggccggcgaacgtgtcgtgatccgtgacggccacggcccgcaggccgagcgccgccgcctgctgcacgacggcggccggcgtgtccgacccgtcggacgcgagcgtgtgcgtgtgcaggtcaatccgctccatggcgcacctccagcccgtccggcagcgcgttgccctgccagaggacaaagaccgtgccgtccgtgacgcgcaccgtggccgccgcgccggtgaacgaattgctcacgccgagcggcatggcgcaccgcagctccgcgtccgtgatctcgtagagcaggccgcgcagcgtgacgccgcgcgcggcatcgccgctgctgaacacggacaccgtgccctccatgccggcgggaaaggccagcgtgccgttttgcaccgccgtgaccacccagccgcagccgatgagccagccctgcgcgcccgcgtccgtgagcccgcgcagcgtctgcaggctggcgatcgtctggtcgaggcggccgccgagcgcgcccgccatcacgagccgccggtacccgtgcgccagcgcccagcgcacggcgaggccgaggtcggtgtcatccttcatgaccggatgcgtctccacgttcgggtggtccggccggtagccgagggagtcaaagtcgcccatgacgaagtccggctcaatgccgcgcgccttcagcgtgcggtagccgccgtcggccgcgatcacgtagtctcccggccgggagctcaggcgcacgccgtcaagactggccgcgccgacgatatagcaaatgttttccaaattcattccagctttcctgaattttcgtccgatattgtaccacattccgcgcgacgagaaaagaattgcatgtaaacagtatttgttagattttaaactcgccaaaaatcaaaaattttatttctattgttactgatatatgatataattccgacgttggcagcacgccggatctcccccgcgccgctgccgcccccacctctgcggccccgccgcagtcagaaaggagacacgaccgtgtcagaaaaggttttcaacaaggtccttgccgccaaccgcggcgagatcgcggtgcgtatcttccgcgcgtgctatgacctcggcatccacaccgtggccatgtactccaaggaagacgaactgagtctgttccgcacccgcgccgacgaggcgtatctcgtcggtgaaaacaagagccctctgggtgcgtatctcgacatccccgagatcatcgacctggccaagcgccgcggcgtcgacgccatccatccgggctacggtttcctgtccgaaaacgcggactttgcccgcgcctgcgaagaggccggcatcacgttcatcgggcctccgagcgacgtgctcggcaagatgggcgacaagctctcggccaagcagatcgccatggaatgcggcgtgccggtcatccccggctgctccgagcctctgcgcgacgggcaggaggcactcgagaaggccatcagcttcggcttccccgtcatcctcaaggcggcagccggcggcggcggccgcggtatgcgcctgtgcgagatgcccgaggacgtcatccccgcgttcgagctcgtcaagaacgaggcgcgcaaggccttcggcaatgacgacatcttcatcgagaaatacctcgtgcagcccaagcacatcgaggtgcagatcctcgccgaccagtacggcaacgtgcgccacctcggcgagcgtgactgctcgttgcagcgccgctaccagaaggtcgtggagtttgcgcccgcgtggagcgtgcccgagagcatccgcgagcagctgcacgctgacgccgtgaagatcgccgaggccgtcggctatgtcaacgccggcacggtggagttcctcgtcgaccgcgacggcaaccactacttcatcgagatgaacccccgcatccaggtcgagcacaccgtcaccgagatggtcacaagcatcgacctcgtgcgcgcgcagatcctcatcgccgagggtcagccgatcagccatccggagatcggtctgggcgaccagaacaatctcaaggtcaacggctacgccatccagtgccgcgtgaccaccgaggacccggccaacaacttcgcgcccgacaacggcaagatcgaggcctaccgctccggcggcggcttcggcgtgcgtctcgacggcggcaacgccggcacgggctcgatcatctcgccgtactatgactcgctgctcgtcaaggtcacgagctgggactgcaccttccccgccgtctgccgcaaggctacccgcgccatcaacgaggagcacgtgcgcggcgtcaagacgaacatcccgtttgtgacgaacatcctcacgcacccgacgttcatcgccggcaagtgccacacgaagttcatcgacgagacgccggagctgttcgagttcaccgaatcgcgcgaccgcgcgacccgcgtgctcaaatacatcgccaacatccaggtcaacaatcccgacgccgagcgccaccagtacgacacgccgcgcttcccgaaggcgcagcgcgagatcacgaagcaggacgggctcaagctcctgctcgacaccgacggccccgaggccgtcaaggactgggtcctcggccagaagaagctgctcatcaccgacacgacgatgcgcgacgcgcaccagtccctgctgagcacccgcctgcgcacccgcgacatgctcaagggcgccgacggcacggccgacatcctcgccgactgcttctcgctcgagatgtggggcggcgcgacgtttgacaccgcctaccgcttcctgcacgagtccccgtgggagcgcctggagatgctgcgcgagaagatcccgaacatcccgttccagatgctgctgcgcggctcgaacctcgtcggctacgcgagctatccggacaacctcgtgcgcgccttcatcgccgagtctgcccgcgagggcatcgacgtgttccgcgtgttcgactcgctcaactggctgccgaacatggagaccgccatggacgaggtcctgcgccagggcaagttcctcgagggcaccgtgtgctacaccggcgatatcctcgacccgacgcgcgaccgctacacgctcgagtactacgtcaacttcgccaaggagctcgagcgccgcggcgtgcacatgctggccatcaaggacatgtccggcctgctcaagccctacgccgccaagaagctcgtgagcaccctcaagcaggagatcggcatccccatccacctgcacacgcacaacaccaccgacaaccagatcgcgacctatctcatggcggccgaggccggcgtggatgtggtcgacaccgccatcggcccgctggccaacctcacgagccagccgtcgatgaacgccgtcgtcgagtccctgcgcggtcaggagcgcgacaccggctttgacccgcagcgcctgcaggagctggccgattactgggccgacgtgcgcctgcgctacgagagcttcgacaagggcctcaaagtgcccgtcaccgatatctaccgctacgagatccccggcggccagtacacgaacctgcagccgcaggtcgagtcgctcggcctcggccaccgcttcgcggaggtcaaggagatgtaccgcaccgtcaacatcatgctcggcgacatcatcaaggtcacgccgtcgtccaaaatggtcggcgacctggcgatcttcatggtgcagaatgacctcacgcccgaaaacatcgtcgagcgcggcgagaccctcgccttccccgacagcgtcgtgagctacttcaagggcatgatgggccagccgccctgcggcttcccgaaggatctgcagcgcgtcgtgctcaagggcgagaagccgatcaccggccgccccggcgacctgctgccgcccgttgactgggatcagctgcgcagcgagatccgcaagttctacccgaactacgaggagccgcgctccctcatctcctacgccatgtacccgaaggtctatgaggagtacatccgccaccgcaaggagtatggctacatcatgcgcatgggcagccacgtgttcttcaacggcatggccgtcggcgagatgaacaagatcaacatcgaggacggcaagaccctcatgatcaagtacatcggcctcggcgaccgcaacgacgacggcacgcgcaacgtgcagttcgagctcaacggtatgcgccgcgaggtctccgtgcccgacccgaccgcgaccgacacggccaagaccgtcgtcatggccgacccgaacgacaagagccaggccggcgcgtccattccgggcatggtgtcgaaggtcaacgtcaagcccggcgaccaagtcaaggtcaacgacgtgctcgccgtgatcgaggccatgaagatggagacgagcgtcgtcgcccgcatggacggcacgatcgacgaggtctttgtcaagggcggtcagacggtcaaggccggcgagctgctgctgacgatcaagtaaatccccggttttccaagcggagcgcaccgtcgtgcgctccgcttttgcgcgcgaaaaaacaaaggcagatggcagtttttcaagccttctcctcaaaggggaaggcttgaaaaggcactccgctgtgtttttgtccattttgctgcttttgtccccatccgcgccggaaagactggaaatgcccggagcattatgttataatctttgaaccatcatgatgagactgggtcagtatcaccgcaggcacccagatctgagaggagttttttccgtgcttgtgccctattcctggttccagatcctctggtacttctacatttacggctttctcggctggtgctccgaggtggccttcgccgccgtcgcgcacggcaagttcgtcaaccgcggcttcgtcaacggcccgatctgctccatctacggcttcggcgtgatgagcgtactgctcgtgctcgggccgctcaagagcagcttctggctgctgttcggcggcagcgtactgttcacgagcgccatcgaatacctcaccggctgggtgctcgaaaaagtgttccacgacaagtggtgggactactccaagcgcccgctgaacatcaagggctacgtgtgtctggagttttcggtgctgtgggggctggcgtgcgtgttcgtggtcgatgtgttccagccgctcgtggccaaggtcgtcgacctcatcccgaaaaagctcggctgggcgctgctcggcacgttcagcgtcctgtggatcacggacaacatcatcaccgccatggagatccgcaagctgccgaagaagctgcgcgccctgcaggccatcgaggattcgctcacggccatctccgacgagatcggcgaggagatctatattcgcgcctcggacgtgaaggaccgcagcatggaggtttacaccgacgcgaaggaaaaaggtgcggagatcgcagaaaagcgcgccgagaactcgctcatgcgccgcagcgaactgctggcccgccgcagcgaactgctgcagcgccgcgaggagctgctgggtcagcgcaacatcgtgcacgagcgtatcgcgcaggcgttcccggcgctgcgcgaaggcaagaccaacggcccggccttcacgcgcgtgcatgagcacgcgcagcgccgcaagcagctggccaaagccctgaaggcaaaggccagagaactcaagaacaaggccaaggaccgctcctgacctgacacgggaaaaggagataactgaaaaccatgaatctctatctgatcggacatgattaccgctacgcggcggagcagatgctgctgacgctgtttccggatgagcgcccggtgtatccggacggccggccgaccggcgaccgcgcggagctgcggctcatgtccggcgcaaaggtgacgaccgcgacgtgcgtgctcgtctatcagggccggacggccaacggccgcacgagcgtgcccaacgaggaactgaccgaccccaacgagaccgaccggcggctgcagggtgcggtcaagcgcgcgttttaccgcgcggccatgggcatcggcctgccgcaccggccgtggggcatgctcacgggcgtgcgccccggcaagctcatgacccccctgctcgcgcagggcatgggcgatgtgcaggccgcgcgctatttcgagcggcactacgacgtcgcgcccgcgcgcgccgcgctcgtcgtgcgcaccgcccacgctacgctgcgcgccatggactcgctcggcgaaaaggacgtgtgcctgtacgtgggcatcccgttttgcccgacgcgctgcgcctactgcagctttgtgagccagtcggtggaaaagagcatggcgctcgtgccggaatttctgcaggcgctcgcgcgcgagattgcggcgaccgccgaggccgtgcaccgcgccggtctgcgcgtcgtgtcgctctacatcggcggcggcacgccgaccacgctctcggcgcgccagctcgacgcactgtgcacgcagctcgacgcagcattcgacctcagcgccctgcgcgagttcaccgtcgaggccggccggcccgacaccatcacggccgacaagctgcacgtgctgcgcgcgcaccgggtcgaccgcatcagcgtcaacccgcagacgctcgacgaccgcgtgctcgaaacgatcggccgccgccacacggcgcaggacatctatgacgcgctgcagctcgtgcgcgcgaccggcggctttgccgtgaacatggacctgatcgccggcctgcccggcgacacgccggacggctttcgcaccacgctcgaacaggtgctcgcgctcgcgcccgaaaatatcaccgtgcacacgctctcgcgcaagcgcggggcagacctctcgcagcagacggcgcccgtccccgacggggcgcaggtcggtgagatgctcgactttgccaataccgcgctcgacacggcgggctacgcgccgtattacctctaccggcagaagttcatgtccggcggatttgaaaacgtcggctggacgcggcctggacaggagaatctctacaacatctgcatcatggaggagctgtgcagcatcctcgccatgggcggcggcgcctcgacgaagctcgtgtgctccggcggccggctcgagcggcacatcgaccccaaatatcccacggaatacatcgccaatatcgaccgcatctgcgcggccaaggcaaaactggaggcatttttcctatgagctatcagatccaggagatcaaccgccgcatccaggctaaccccaaggaattcgtggatgcgtgcgacgcggcctatgccgaaaagatcgagcgcgcggcccgcgccatcgccgagaatgtgcgcacgtgcccgatcgtgctgctgtccggcccgtccggcagcggcaagaccaccacggccatgaagattgccgaggctctgcgcgggatgggcatcggcagccagagtctcgccatggacgactatttccgcaccgtgaacccgcgcaccgcgccgcgcacgccggagggcgacatcgacttcgagtcccccgcgtgcctggacatggacctgctcggcaagcacctcaacgcgctcgcccgcggcgaggagatccatctgccgcgctacaatttcgtcacgcgcgtgcagtccggcccgatcggccggcccatgcgtctcggcaaggacgaggtcgtcgtgtgcgagggcatccacgcactcaatgacgacatcgccgcctactgcccggatgcgttccggctgtatatcagcgcgcgctccgtcgtcgtcgacggtgacgggcaggagatattcaagggcacgtggatgcgcctgctgcgccgcctcgtgcgcgacagcaacttccgcggcacgcccgccgccgcgacgctggatatgtgggccaacgtccgccgcggcgagaagcgcttcatctccccgttcaaggagcgcgcgaatctgatgttcgactcgtcgttcccgtgcgaggtgtccattatgaaaaactttgccgcgcccctgctcgcggccgtgcccgagggcgcagagcgctatgcggagatccgcagcatcctgccggcgctcgagcgcttcgagacgattgaccccgccctgctcgcgcccgagagcatgctgcgcgagttcatcggcggcggcgtgtacagctactgagcggacgataaaaaacagcacccgatcccataggatcgggtgctgttttgtctgtcccatctgcgcgccgcgccgtcagctcagccgctgcacgagcgcgtcccacagctccagcagccggaagcgcacgacatagccgccgtcggactccgtgacgaggcgcacatcgtcgtccgagagcgcctgcaccgcctgctccgacaatcccgccgcctgcgcgcacagcggtgggaagatgacgcaccaccagttgtgccccgcgcccgcgccgagcgttacacgcaaggaggtgtacacccctgccgggagggcgaacgtgccgtagtcgcgcgtcgggtagtgctcggggcccagcgccacgcgcaccggccgctcccccgccgccgcctgcgccgcgcgggcgatgccgtcgaggtcgcccgcgatgagctgctgcgccgcatcgacgtccgtcacgccctgcagctgcggctcgagataggccagcaccgcgtcgcgcacctgcagcttcacggcctgctcggcgtcgtcgtccgagacggcgatcacgtgcagccgcacgagccgggccgcgagcagctggctgcgcgcctgcgcccacgtgccggtcagcagcgtcacgcacacggtcagcagcagcgccagctcccacggacgcagcgcgcggccgggatcggaatttatggagagagaatgggtatgcatcgtatgtccgcctttctgtgatgaaaaaactgccggtaccgggcatctgtgctcagtatcggcagttttgttcggttttaatccggggacgctcagatctccaggcggccgatggtctcggtcaggaagcactcggcataatcgcgcgcgagccggcgcttggcatacgccgcgctgtcggcatcggcaaagatgccgaacacggccgagcccgtgccgctcatgaccgcgccgagcgcgccgccgtcgagcaggcggctcttgatggccgcgatctcgccctcgcggtgggtgagcacgtcctcaaagacgttgtacatccggcgggcgagccggggcatatccccgtcggcgagcgcggcgcagatgccctccgtgtccgggtggcagcgcgaggtgcgcgcgtccacgcggtggaacagctccggcgtcgagatcggaaaatccggcttgcagatcacgaccggcatgcgcggcatgggcgtgacgggcgtgagccgctcgccgcggccctcggccagcatcgtgccgcccgcgacacagtacggcacgtccgagccgacctgcgcacccatctcctcgagctccgcgcgggtgaatcctgcgccggtcagccgctcgagcgcgcgcagcacggccgccgcgtccgacgaaccgccgcccagccccgcgcacacggggatgcgcttgtgcagccggatgtgcacgccgcacttcagccccgcgcgcgcgagaaacacctgcgccgcgcgcacggccacattgtccgccccgcagggcagatagctgcggttggtctcggcacggcagacgcccgtgtcgtcgagcgtgacggtcacgtcgtcgtgcagatccacgctctgcatgaccatgcgtaggtcgtgaaacccgtcggagcgcgcaccgagcacgtccagcgacaggttcagcttcgcccacgcggcctccgtcgtcgtgccggtcacagttttttcagctcgaagagcaggtccatcagctccgcgccgtcgtccacgtacgggcccttgcggccgttggcctcggaatacggcaggccggagccctcgctcacgcggctgtcatagagcacgaacggcacgggatcggcgccgtgcgcgccgttggccatatacgtcatgtggtccgagagcagcagcaggcggaagtcctcgcccgcggcgcgcagcgcctcggtcacgggggcgacgacgtcggcgctcaggcgctcgatggagtagatcttgtgctcgaggtcgtggttgtgcgtggcctcgtccgggccctcgagatgcagggccacgaagtcgtgctttttgagcacgcccagcgcggcggcgaccttcgcggcgtagtcggtgtcccactcgccggtcgcggtcgggacggtgacggcctcaagccccgtcaggatgccgatgccgtggcacagcggcacggccgagacgacgccgccgtccgagccgtagtgctcggggaagttcggcagcgcggccgccgtgccctcggcccagaaccagacgccgttggccgggagcttgccggcggcgcggcgcgcgacgttgatcgggtgctggtcgagaatgtcgaacgcgcggcgcatgagctcgcgcagcacgtcggcgttcgggcagccggtgggcaggatggggccgatctcctcgccgaggtggtcgtgcggcggagcgagctgaatgcccttgatgtccacgtggctctgcaccgcgaggtggcggaacgacgagcccttgtggatgaccatgccggcctgctcggccagcgggcggaagtcggggtggtcaaagagcatcgtcacgagctcgtccgactcgcggccctcgatgctgcccgcgctgtgggagatgatgtgtttgtgctcgaacggcacgtcctcatcggcatacgtgaccatgttgcagcggtagcacgcatcgccgggggcgagccggatgccggacgccgccgcctcgagcggggcgcggccgaaaaagtacttgcgcggcgagcagccgaagatggacatgatggccgtgtcgctgccgggggcgaagccctcgggcacgttgcgcacgctgccgaggatgccgtgacgcgcgagggcatcgatcgcgtcttttttcgatgcttcgagcggcgtgcggccgccgagcgtgtcgagcggatggtcggccatgccgtcgccgatgacgagaatgtatttcatactgtatccctcttttcggaagatttttcgccgcggggtgccctgtgggatgccgggacccgcggttttttctgccccacagtatatactatttcccccggtttgtgaagcggcatggcgcgttccggggcattttgctgctatttgtagaattcaacaaaattattcaaatcattaaattaggtattggcaatttttcgtcatcatgatatagtagaatactgttaagtatccgctaagttttcgctaagaaattgccccggcattgccggggttttccgcagatcgggagggacagcaaatgtcgatcggacaatatctgctcggcggcgtggccggactggtgttcggcctgctcgtggccgccggcaacacgctgctgacgcgccgcagcctgcagcgcgccaagcagagccaggccaccgtcatgggcaccagcggcctgcggcaggtcatcaacctcgccgcgctcgtgctcgtgtacctgctgcgcaaggtcgtgccgctgcccctggccggcacgctcatcggcacggccgtcggcctgtcgggcggcagcatcgccggcgtgtggatcctcgcgcggaaaatggacgacaccatccccgccgagggcgtggaagtgccggacgcggagacggccgagctgcccgaagacgctgcgcaggaatccacgccggacactgacccggcggacgaacggagggacgacaccaatgggtgagacgaatgtactgttttccatcggcccgctggaagtgaccggcgcggtcgtgaccatgtgggtcatcatcgccgtgctggcgctgctgtcgtggctggccacgcgcaggctgcgcgacgtgcccggcccgctgcaaaacgccgccgaaatggccgtcgaaaagctgcagggcttctacggcggcatcctcggcccggccaatgcccggcgctacttcccgatgatggcgacgtttttcatcttcatcgtcgtgtccaactacatcgggctgctgcccggcgcggggcaggtgttcaccgtgccgacggccacgctgtccgtcacggcgggcctggccatcatcgccttctgcatgacgcacaccgtcggcatccagcgccgcgggctcaagggctatctcaagagcttcatcaagcccttcctgctcatgctgccgctcaacctcatcgagcagatcgtgcggccgttttccctcgcgctgcgactgtacggcaacctctacggcgaggaaatggtcacgcacgagctcggcaacctcttcccactcgtgctgccgctgctcatgcaggtgctgagcctgctgttctgcctgatccaggccgtcgtgttcacgatgctgctgtcgatctatatcgaggaagccatcgaggagtgacgccctgcatcccataaccacgcaaggaaagaagattcgatcgttaagaaacattaggaggaaaagagttatgtcaaccggaatcattgcgatcgccgccgcgctcgccatcgccatcagcaccatcggccccggcatcggccagggtctggccgccgcccacgccatggacgccatcgcgcgccagcccgaggccgccggcaccatccgctcgaacatgatcatcgccatgggcctgctcgaatcgctgacgatctacggcctgctgatcgcgtttctgctgatcggcaagctcggctgagaagcccggaacaagggaggcacacgctttgagcatcaacatctccgaactgatctggacggtgatctgctttttcgtgctgctggtggttttgaaaaagctgctgtttgacccgctggtgtcgttcatggccgcgcgcgacgcgcgcattcaggacgggctcaacgccgggcgcaccgcccagcagcagctcgacgcggccgcgcgcgtacgcagcgaggcgcagcgcaaacaggccgccgcggcggacgcgctgctggccgaggccaagagcgcggccgagcgcgcgcgcgcccaggcgctgcagagcgcgcaccaggaggccgcgcaggccacgcgcgccatgcgggcgcgtgtgcgcgacgaagagaccgccgcggccgccgccgtggacgcgaaactgcccgagctcgtcacggcactgaccggcgggctgctcggcagcgacgcagccgagcgcaatgccgcgcagatccgccaatgggtcgcccccgcgcatgagggctgaaccatgaatgaaatgaatcgaaagggggcgccgacgccatggaatttctgagagccatcggccccgtcttcaacttcctgctgctggcaggcgcgctgtttttcctgacgcgcaagcgcatccgcaagctcttccgcgaccggaaagagcgcattgccgaggcgctcggccgcgcggccgacgcgcaggatcaggcccgccacaccgccgaggacattgccgaggcgcagcaggcggccgacgcgcaggcgcagtgccagcttgcggacgcgcagcgtcaggccgcggccaacaccgcggccgccgacgccgagaccgcccgtcaggccgaggccgtgcgccgcagcgcgcagcagaccgaggcgcagctgcgcagcgacatggaagaccgcgtgagcgacgcggccatcggccgcatcacggcggccgccgccggcgtgctggcgcaggatgcgttcgcacccgcgcgcgcgagtctcgttgacgactttctcgcccacatcggcgagcacctgaccacccagccgagcgacgcgctcgccctcgccgagaccggcacgctgaccgtgacggtcgaatcggcagagcccctgagcgccgccgcgctcgacgcgctcaccgacgcgctcacgcgcgcctacggccacgtcaccgtcatgacgaccgtgcgcccggagctgatcggcggcgtgtgcctgcgcatcggcgacacgcactatgacggcacgctgcgccacgcgctcgacctgctcgagcaggacgcggccaacagcgtcctgcacaccacgcaggaaacgcccgacctcgctgactgcatccgcgccaagctcgcggacacgcacgtcggcatcgacgtgttccagtccggcgtcgtcacgagcctgtcggacggcatctgccgcatccgcggtctggccgacgccatggccggcgagctgctggcctttgacggcacgctgcgcggcatggtcatggacctcggccgcgaggacatcggcgtcgtcctgctcgggccctacggccacctgcaggagggcgaccgcgtgcgccgcacggggcagatcatgtccgtgcccgtgggcgaagaaatgaccggccgcgtcgtcgacgcgctcggccggccgatcgacggtctcggcccgatccgcacgacggagcgccgcgccatcgagagccccgcgcccggcgtcatcgcgcgcaagggcgtgagcgtcccgctgcagaccggcatcaaggccatcgacgcgctcgtgcccatcggccgcggccagcgcgagctcatcatcggcgaccgccagaccggcaagaccgccatcgccatcgacgccatcctcaaccagaaggacaccggcgtgctgtgcatctacgtcgccatcggccagaaggaatcgaccgtcgcgggcgtcgtgcagaaactgcgcgaccgcggcgccatggcctacaccaccgtcgtgtgcgcgcacgcatccgagaccgcgcccatgctctacatcgcgccctacgcgggcgccgccatcggcgagtacttcatgtaccgcgggcgcgacgtgctcatcgtctacgacgacctgtcgaagcaggccgtggcctaccgtgaaatttccctgctgctgcagcgtccgcccggacgcgaggcctaccccggcgacgtgttttacctgcactcccgcctgctcgagcgcgccgcgcgcctgagcgaagaagccggcggcggcagcatgaccgccctgcccatcatcgagacgcaggcgggcgatatctcggcctatatcccgacgaatgtcatctccatcaccgacgggcagatcttcctcgaaacggatctgttccatgccggtgtgcgcccggccatcaacgtgggcctgtccgtgtcgcgtgtcggcggcgcggcgcagctcggcgcgatgaagcaggtcgccggccggctgcgcatggatctggcgcagtaccgggagctggcgtcgttcgcgcagttcggctccgatctcgacaaggccacgcgcgacacgctcgcgcgcggcagccgcatgaccgagctgctgaaacagccgcagtacgcgcccatggacgcggccgatcaggtcgctgtgctcttcgccgccggcgaggggtacacggacacgatcgccgtcgaggacgtgccgcgctacgccgacgccctgctcgcgcgcatccaccggacgtatccggagctgcacgcgcttgtgcacagcggcaaaaagctcccgcccgaggcgctcgagcgcctgcgcgagcttgccgccgagaccctgaagaatctatgaaccatcatccccgccgccggcagaaaggagttgacgccccttgacgaacctgcataagatccgcgcgcgcatccgcagcgtgaacagcacgcagcagatcacccgcacgatgaagatgatcgcggtgtcgaagctgcgcaagacgcagacgagccttgcgggcgtgcgcctgttcgcggacaagagtcaggccgtgctcaacgccctgctcgccggcgacgcgaactttgagcacccgtatctcacgccccggcggcacgtcggccgcgtgtgctacgtggtcttctggggcaaccgcgggctgtgcggagcgtataaccagctgctgctgcgccacctcgaggggctcgtgcgcgccgaggcgcgcccctgctccgtgatcgtgtgcggccgctgggggcgcgacgtgctcgcgggcaccgacctgcccgtgcggcagatcttctccgacctgagcgacacgcccaccatggccgaggcgctcgagatcgccgaggaactcaaaaacctctaccgcaccggcgaggcggacgagatccacctcgtctaccagcactttgactccgtgctgcaccagacgccgacgcaccggcagctgctgcccgccgcgccggaggccgacgcgcccgccgcgaacaacaactatctgttcgtgccggacgcgcagaccgtgctcgacaacgtgctcgagctgtacctgaacaacacggtctacgccgtgatgctcgaggcccgcgtgggcgagcacgccgcgcgcatgaccgcgatgaccgccgccacggactcgacggcggagctcatcgaggacctgaatctggagttcaaccgcgcgcgtcaggccgcgatcacgacggagatctccgagatcgtcggcggcagcgccgcgctgaaaaaatcggacaaatcggactaacaccgcggcggcagcgccgcgtcccacgaagggagaacgtatggaaaacggtatcgtcaaaagggtcatcggcccggtggtggacgtgcagttcccggccggaaagctgccggagatcaacaacgccatcgaggtgcacgccggccagcgccgcatcgtcatggaggcggtgcagcagctcggcgacaatgcggtgcgctgcatctcgctcttttccaccgacgggctgcagcgcggctgcgtcgccgtggacaccggcacgagcgtgaaaatgcccgtcggcgaggcgacgctcggccgcatgttcaacgtcatcggcgagccgatcgacggcaaaggccccgtcaacgccacggaatatctgcccatccaccgcgaggccccggccttcacggacatcgcccccgcgaccgaactgctcgagaccggcatcaaggtcgtcgacctgctcgcgccctatgccaagggcggcaagatcggtctgttcggcggcgcaggcgtcggcaagaccgtgctcatcatggagctgatccgcaacatcgcctacgagcacggcggctactccgtctttgccggcgtgggcgagcgctcgcgcgagggcaacgacctctggaacgagatgaacgaatccggcgtcatcagcaagacggcgctcgtcttcggccagatgaacgagccgcccggcgcgcgtctgcgtgtgccgctctcgggcctgacgatcgcggaaaacttccgcgacgagtccgggcaggatgtgctgctgttcatcgacaacatcttccgcttcacgcaggcgggcagcgaggtgtcggccctgctcgggcgcatgccctccgccgtcggctatcagcccacgctcgccaccgagatgggcaagctgcaggagcgcatcacctccacgcgcaacggctcggtcacgagcgtgcaggcgatctacgtccccgccgacgacctgaccgaccctgccccggccacgacctttgcccacctcgacgccacgaccgtgctcgaccgcagcatctcggagctgggcatctacccggccgtcgatccgctcggctcgacctcgcgcatcctcgagccggacattctcggccgccggcactatgacaccgcgcgcgccgtgcagcgcgtgctgcaaaagtataaggacctgcaggacatcatcgccgtgctcggcatggacgagctgagcgtggaggacaaggccgccgtcaaccgcgcgcggcgcatccagcgctttttgtcgcagccgttccacgtggcggaaaacttcacgggcatggccggcaagtacgtcccgctcgacgagaccatccgcggcttcgaggccatcctcggcggcgagtgcgacgacattcccgagcaggcgtttttgttctgcggctcgatcgacgacgtgctgcgcaagcgcgacgcgctgcagtgaggtgcgccatggcggacacactgcatctggagatcgtcacggccggcggtgcggccgtggacacgcaggcccagcaggtcacgctccccctcgccgacggggaggccggcatcctgccgggccacgcgccgctgctcggcgcgctcgtgagcggcgtcgtgcgctatacttccggcggcgcggagcactactgcgccgtgagccccggcacggtgaacgtcgccgccaacaccgtgaccgtgctcgcccgcacggccgagcccgcaccggacattgacctgccccgcgccgaggcggcgctgcgccgggccgagtcggatctggaggtgcgcggcatggagatgaacgtctccacggccgaggcggcccgcgcgcgcgcccacgcgcgcatccgcgcggtaaaactctggcgcgaaaacggataaaaacccggccggaagcccccgcactgtcccatgcagcggacagccgcggggttgcaatttcacctgggatatgagaaaatgtctgcgtattcgcttacgcagacatttttgcgttccccgccctgcgcaacggggaaaacgcactgattgagcgtggagggtagctggtatacagccagagcacaacgcacgccgccgcaggtgcgcgcagtcctggcctcccctgtgtaaggggaggtggcgcggcgctttgcgccgtgacggagggggtgcagacacccccacgcttttatcatcaaacaggagatgtgacccatggcccaacccactcgcggccgcaattcgcaggccaaaaatcatctgatcaccatcgtgctcgcgctcatcatcgcggtcctcgccacgtggttcggctacggccgcgaccacgcagccgccgacccgagcgccacggctgcgcccggcgtcaccgcgacggccatgcccggcgacgggctgaccgtgacgtatctcgatgtcggccagggcgactgtacgctgctgcagtgcgacgggcaggtcatgctcatcgacgcggccgagggcaaccaggccaacaagatcacggcctacctcaagcagcacggcgtgacggccatcgactacctcgtctgcacgcacgcgcacgccgaccactgcggcggcatgaaggccgtcatcgcggccttcccggtgcgcacgctctacagctccgtcacctcgagcagcaacggcgcgttccagcgcgtcatgcgcgcggccgaaacggcaaacctcgccatcaccgtgccgaacgtgggcgacacgttctccctcggcagcgcgaccgtgaccgtcctcggcccgcaaaagcactacagcgacgtcaataaccagagcctcatcctgcgcgtggactacggcagcaacgccttcctcttcaccggcgacgccgagtacgagagcgagacggacgtgctcgacgcgggcgaggacgtccgctgcgacgtcatcaaggccggccaccacggcagccgcacctccacgggctaccgcctgctgtacgaggcgcagccgaagtacgccgtcatcagctgcggcgcggacaatgagtacggccacccgcacgacgacacgctcagccgcctgcgcgacgcggacgtgaccgtctaccgcacggaccttaacggcacgatcgtctgccgctccgacggggtcaacctcaccttcaccaccgagaaagaaggctgatccccttgcaccgcaccctctcggcggcgggcgcgttctggctcgccgcgttcacgtatttcatctggggcttcacgttcctcgcctcgcgcatcgcgcaggactacggcacgccgttcgtgctgctgttctggcgcttcgcgctggcgttcctgctgctgaacctgctgcgcctgacggggcgcttccccgtccgcctgcacggccgcaggctctggcccgtgctgctggcgggcctgttcgagcccgtgctctacttcccctgcgagcagtatggcctcaagctcacgagcacgtcgttttccggcgtcatggtcgcgctcatcccgctgtgctcgctcgtctacggggcggtcttcctgcacgaaaaggccacgtggcggcaggtcgtgttctcggtcctctccgtcgcgggggtgatcgtgctggccgtctacgccaccggcatcggcgcgggcagctttctcggctttctcatcctgctcggcacggtctttgccggcgcgggctacatagtggcctgccgcgcctgttccgtcagcttcaccgcctttgagcgcacgtacatcacctgcggcatgggtgccgccgcgttcggggtgctgtccgtgctcgagcaccggcacgacctgagcgccgtcgtgctgccgatgacgcacgcgccgtttgcgctggccatcgtgtttttgagcgtcgtggcctcggtgctgtcctacctcgcgctcaaccgggcgctggaggtgctgcccgtcgcgcgcaccgcagcgctcatcaacttctcgaccgtcgtgtccgtgctcgccggggtgctcctcctgcacgagccattcggctgggtcagcgccgcggcatcggccgccatcctcgtcggcatctggggcgtgcagcgcttcgccgcgccggcacttccggacgctgacaagcgcaccgagccgctgcccccgtcgtgagcaggccggtcgtttgccccacttccagtctagtatgcttttgcattacttgtcaagcgagaattgctgattttgcataattctagttttccgcaatctttccacacagttttccacattttcgccggtttcccacagcggctttctttccccctggctttctttgagagagacagggtaagatatgctttgccgtgtgttcctgctgcagggtaagacacggtgtggtacggtacggtactgtacggtatggtacggtgccacgtgacgtacacacaccgtacccgtgacacaagcgccccgccgcgccgggcatttccggccgcaaatccaataaatattcatttcaaaggatgacccctatgcaatctaccgaacaaaagatcgaacgcgccgcgctggctggtctcgccgcggcgaacatggacgaacgcgagcgctcgacggacatttcccttgccgagctggccgcgctcgtggagacagccggcggccagcccgtcgtgacgctgctgcagaacaagcccacgcccgacccgcgcaccttcctcggcgagggcaaggtggcggagctgcgcgaacgcatcgtcgccaacgactgcgacctcgcggtgtttgacaatgagctctccccgtcgcagatgcgcgtgctagaggaggaactcggcgtgcgcgtgctcgaccgctcgggcctgatcctcgacatcttcgcccagcgcgcccagacgcgcgagggccagctgcaggtggagctggcgcagtaccagtaccttctgccgcgcctgaccggtatgtggacgcacctcgtgcggcagacggcctccggcggctcgtcgccgatcggcacgcgcggcccgggcgaaacgcagcttgagaccgaccgccgccacatccgccgcaagatccagaagctgcaggccgaactcgaggacgtgcgcaagatccgccgcacgcagcgccgccgccgcgagaaaaacgctctgccggtcgtggccctcgtcggctacacgaacgccggaaaatccacactgctcaactgcctgacggggtcggacatcccggccaacgaccgcctgttcgacacgctcgacaccacgacccgccgctggcgcatcgacgccgcgcaggaggtgctgctctcggacacggtcggcttcatccgcaagctgccgacgcacctggtcgaggcgttcaaggccacgctcgaggagctgacgtatgccgacgtgctcctgcacgtgatcgacctctcgaaccccgagtgggaggcgcaggcggaggtcgtcgaccggctcatcgaccagctcggcgcggcgcacacgccgtgcatccgcgtgttcaataagtgcgatgcctatctcggcatcctgccgcatggggagaatatcgtgtgcatctcggcccgcagcggtgagggcgcggcggagctgaccgagtgcgtgcgcgccatcctcggccgggccgaccaccatgtgacgctgctgctgccgtatgcgcagggcgcgctgctcgaaacgctgcaccgcgactgtgccgtgctgcacaccgactaccgcgacgacggcatcgcgctcgaggtcatcatccacccggagcagtggacgcggctcgagccgttcgtcatcgcgggcgaggaggggtaatatggacagctaccgcattcccacgaaatccggcgcgtcggagtacgtggacaaacgctcgcgctttctgggcctcgtgcggccggtcggctccgaggacgaggcgcgtacaatcatcgccgcgtgcaaaaagcagtatcacgacgcgcggcacaactgctggtgctacctgctgcgcgacggcaccgaacgctactccgacgacggcgagccgcagggcacggccggcatcccgatgctggaggtgttccgccgcgcgggtgtgacgaacgttgtctgcgtcgtcacgcgctacttcggcggcgtgctgctcggcacgggcggcctgctgcgggcgtataccgccgccgcggccgatgccctcgccgacgccggcatctcggaggtgcgccgctggctcgcctgcgaggtcagcacgccctacgcgctctatgaaccggtgcgcgcggccgtcgccgcgctcggcggcgtcgtgcaggagacgcagtatgccgccgccgtgacggtctgcgccctgctgccggaggaagccggcgaggcctttgccgcgcaggtgcgcgacctgaccgccggccgctgcgccgtgcgccccgtcggcgagacggagcgcgccgtccccctcgccggcgcgggcttgtgagcgcgtgtgcacagtacctgtgcgcgccgcacgccggagtataggcgtatataagtatcgcaaagccctcccaaatcgggagggctttcgtgccgctgcgcaccttttgccttcccacttgcggcgcgaatgatcgacggttttgaaatatttgagccgcgtggaagcccgagggggcaaggtccgcctcggatgaaatcatgcatcgccctctggcgatgcctcccccttgaggggaaggcatcgcggcagccacgccgcgacggatgagatgcgcgtcgaacgcacatggaatcccagccaaaatattgcataaacattctgcttgacgaatatctatccgcatccattttccgcggatctttaccgcgcttgcaggccaaaaatgatcgtgaaaaaattggcactcgatttggaaactttttttctgcattttttcaaaaaaaagagggaaatgcacggcaatgtcgtatcagagtattgcagccggaaatggcgcaaggcgctccggccgcaaccatggattttatgtggaaacggagggatccctgtgccctgcccaagagaaaaacgcgaggccgccgaggcgctgctcatcggcccgcacggcctgctgagcacgcagtccaccggccgcccgacgcccgagccgccgtgtgagatgcgcacgtgcttccagcgcgacgtcgaccgcatcacgcactcgaaatcgttccgccgcctgaaacacaagacgcaggtgttcctgcgcccggagggcgaccattaccgcacgcgcctgacgcacacgctcgaggtcgcgcggctcgcgcgcacgatcgcccgcgcgctcgaactcaacgaagatctcaccgaggccatcagtctcgggcacgacctcggccacacgccgttcggccacgcgggagagcgcgcgctcaacgcgatctataccggcgtcggcttccggcactatgagcagagcatgcgcgtcgtcgaccgcatcgagcgcgacggccgcggcctgaacctctgcaacgagacgcgcatcggcatcctcaaccacacgaccgggcagccgcgcggcacgctcgaggccgacgtcgtgcgcctggccgaccgcgtggcctacatcaatcacgacctcgacgacgccatgcgcggcggcatcgtgcagccggaggacgtgcccgccatcgtgcgcgagcgcgtgggcgagcgcaacagcgtgcgcatcaactccatcctcacggacatcatcgcccacagcggcgacggcgagctgcgcatgtcgcccgatatgcgcgaggccgtggacgtgttcacgaccttcatgtacgagggcgtgtactacaaccccatcgccaagggcgaggagcgcaaggtgcagaatatcctcgggagcatctgggaatattatgtcaaccacattgacgagctcccggtggtctatcagtctatcgcggacgacgaagggccgcagcgcgcggtgtgcgactatgtgtccggcatgaccgacagctatgcgctggaggtgtattcggaactgttcatccccgccgcctggaccattaaataaggaagtacatacaacggaaaccacagaaagaaggtgacgcacgtggcctttccggaatcctttctgcaggagctcgccgagcgcaacgacattgtcgatgttgtgagcggctacgtgcgcctgacgaaaaagagcgggtcgaacctcttcgggctctgcccgtttcacagcgaaaaaacgccgtcgttttccgtctcgccggataagcagatctaccactgcttcggctgcggaaagggcggcagcgtcatcagcttcatcatggagattgagaacctctcgttcccggaggcggtggcgtttctggccaaccgcgcgggcatgcagctgcccgagcagtcgaacgaccccggcgcgaaaaagcgccagcgcctgctcgcgctcaaccgggacgcggcgcgctttttccacgcgcaactcaagaccccggccggccagccggcgcgggactatctcgcccgccggcagctcacggcgcagaccgtgacgcgcttcggcctgggctccgcgcccaacacgtgggacagcctcgtgcgcgcgatgaaggcgctcggctactccgagcaggagctgtttgacggcgggctcgtgcgccacggccgctccggcggcgtgtacgacacgttccgcaaccggctcatgttcccggtcatcgacgtgcgcggcaacgtcatcggcttctccgggcgcatcctcggcgacggagaacccaagtacatgaacagcccggaaaccatcgttttcagcaagagccacaatttgttcgcgctcaatttggctaaaaagtcgaaatgcgggtatatcatactggcagagggcaacatcgacgtggcgagcctgcatcaggcggggtttgacagcgcggtcgcctcgctcggcacgtcgctcacgccggagcaggcgcggcttctctcgcgctacacgagcgagatcgtcatcgcctacgacaacgacggcgcggggcaaaaggcgtcgcagcgcgcgatcggcatcctcgaaaagctcgaggtgcgtgtgcgcgtcctgcagatgcagggggcgaaagaccccgacgaatatatcaagaccttcggcgcggacgcattccgcaacctgctcgaacagtcggaaaaccacatcgactaccggctcggcgcggtgcagcgaaaatacgacctccaggtcgacgagcagcgcgtggccttcgtcaaggaggcggcgggcgtggtggccgagctgcccggcagcgtcgagcgcgaggtgtacgccatgcgcgtcgcggagacggcgggcatgcccgccgcagtcgtgaccgacgaggtgcagcgccagcgcaagcggcggctcagccgcgcgcgcaaggagcgcgagcgcgacctgctgcgccccgcgacggcgatgcagccgcccgggcggagcatccgcttcgacaatccccgctcggcggccgccgaacagggcatcattaaattattgtatctcgaccccggcctgttccgggatcggacgaatgtgccggacgcggcgcagttttcctcgccggagctgcggcacatttacaccgtcctgctcgcccacggcggcacgggcacggtgcagatcgcggcgctctcgggcgagctgagcccggacgagctggccctgctgaccggcatcatccagcagccggcggagcttgccaacggcgcgcgcgcgctcgacgactacataagcatcctacagacccaggccaccgccggcgcagcgtcgtcggaggcggacctgctggcctttgcaaagcaactcaaagaacataaagggtatggtggtaaagatggaacagaaagaacttaacaacctctcggctgaagaactcgacgccatggccgacgcgctgctcgcagccgacgacgccaagcaggcggaaaccaaagccgctcccgccgcggacgagcccgcggaggacaagcccgtagccgaaaagccggaatcggaaaagaccacggaagaaaagctcaacgagctcgtggaaaagggcaaaaaggcgggcaaactctcgagcaaggacctcatggtgctcgaggacatgaacctctcgagcgaggagacggaaaagttctatgaccagctcgagagcctgaacatcgacgtgctcagcgacgacgcgctgcccccggtggacgaggacgcgctgcccgagctcgaggagctccaggagatcgaggaagtcaccgaggaagagatgaatgagaccgaggccatggccgacacgttctcgaccgacgacccggtgcgcatgtacctcaaggagatcggcaaagtgccgctgctcaccccggaggaggagcaggagctggccaagcgcatggccgagggcgacgcggaggccaagcaccgcatggaggaggcaaacctccgtctggtcgtgtcgatcgccaagcgctatgtcggccgcggcatgctgtttctcgacctcatccaggagggcaacctcggcctgatcaaggccgtcgaaaagttcgactacacgaagggctacaagttctccacctacgccacgtggtggatccggcaggccatcacccgcgccatcgccgaccaggcgcgcaccatccgcatccccgtgcacatggtcgagacgatcaacaaggtcatccgcgtctcccgtcagctcctgcaggagctcggccacgacccgagcgccgaggagatcgcggcggagatgaacatgccggtcgacaaggtgcgcgacattctcaagatcgcgcaggagccggtctcgctcgagacgccgatcggcgaggaggaggactcccacctcggcgactttatccccgacgaggacgcctccgagccgagcgaggcggcgagcttctcgctgctcaaggagcagctcatggaggtgctcgacacgctcaccccgcgcgagaagaaggtgctcgagctgcgcttcggcatcgtcgacggccgcacccgcacgctcgaggaggtcggaaaggagttcaacgtcacgcgcgagcgcatccgccagatcgaggcgaaggccctgcgcaagctccgccaccccagccgcagcaagaagctgcgcgatttcctgaactgagtccggataggacagcgccctccgggcgcggcgggtcagcctgccgcgcccggatttttgctgtgcgtccaggccttcctgcagagaaagcgatccggcctgcccaaaaatctcaacgccgccgacggagcgttgatgccgtcccgcgcccggttttgccgctgtaaaaccgcccattcccccgccccgaaacggccggaaaaataattatgaacaatctatcaataatataggaaaaggccttgactttccgaccggccgggtgtaaattagcactcgaaggtcaggagtgccaacagtcggcagctccgagtgccagcggaggagatcatggacatcagcagccgcaaaaagaaaatacttgccgcggtcatcgaggaatacatccgcacggcggagccggtcggctcaaaggccatcgccgcgagcgcggacctcggctgttcctcggccacgatccgcaacgagctggcggagctggtcgccatgggctatctcgagcagccgcacacgtcggcgggccgcgtgcccaccccgctcggctaccggatgtacgtcaacgagctcatggagcacaaggacctcaccgccgaagagacgcaggccatcacgcagagcctgacgggccgccaccagcgcggcgagctcatgacggacgcgagccgtctcgcctcgcagctgacgaactaccccgccgtgacgctcacgacgagcgccggcgtgacgatccgccgcttcgacctcatttatctcgacgcgaacagcttcatcatcgtgctgctcctgagcgacgacacggtgaaaaacaagctcgtgcacctgccggtctcggccgagcagagcatgatccagaagctggccaccgtcttcaacgcccacttcaccggcatccacgagagcgacatcaccccggtgctgatccgctcggcggagcgcgccgcgcaggacaacctcggcatcacggccgtgatcgcggccttcgccattgaggtgctcacgggcgcgggcgccgcgcagacgtacctcgtcggcgagtcgcagctgctgcaccagccggagttccgcgaccctgacaaggcgcaccgcctcatgagctacctgtccgacggcagcaacctgctcgacatcccgatagagcagctcggcggcgacaatgaggtgcgcgtgctcatcggcccggaaaatgtggccgaggagctgcgcgacagcagcgtcgtgctcgcaacgtatgatgcgggcgaaaatatgcgcggtctgatcggtgtggtcggcccgacgcgcatggactattccaaggtcgccgcgaagctcagcttcattgcggccggcctttccaagctgctcggcggcggcacgcttccgccccccgggctggacaacaagctgatcattaagggagacgatacagatgagcacgaaaacgaacgacccgaagcagacggcgccggaaacggctccggccgctgaagacgtaaaggccgacacggccgccaagaccgaagaggccgaagaggccccggtcaagaaggccgaaaaaaaggccgacaagaaggaagccaaaaaagaaaaagaacccaaagaaaagaaagagacgaaaaaagagatcgaagccgatctcgcggcggagaaagataagtacctccgcctgctcgctgaatatgacaactaccgccgccgcagcacccgcgagcgcgaagcgatctacgcggacgtccgctgcgacacgctcaaaaagttcctgccggtgtacgacagtctgtcccgcgctctggcgcagaccccggcagacgatcccgcccgcaagggccttgaggggatcatgaaccagtacaacaccgcgctcaatcagctcggtgtgacggcgatcgaagccgtcggccaaccatttgacgccaaccgccacaacgccgtcatgcacatcgaggatgatgcttacggcgagggcgttgtcgtggaggagtttgaaaagggcttttgcatcggcgaccgcgtgctgcggtattccgtcgtgaaagtcgcaaactgatcccatataaattcgtatacacaatctgctttcaatacaggaggaaatcattatgagtaaaattatcggtatcgaccttggcactaccaatagctgcgtctccgtcatggagggcggcgaagcgaccgttatccccaacgcggaaggtcatcgcaccaccccgtccgtcgtcgcgttctccaagaccggcgagcgtatggtcggccaggtggcaaagcgtcaggccgtcacgaacccggaccgcacgatcagctcgatcaagcgcgagatgggctcggattataaagtagagatcgacggcaagaagtacaccccgcaggaaatcagcgccatgatcctgcagaagctgaaggctgatgcagaagcttaccttggcgagcccgtgaccgaagccgtcatcaccgtgccggcctacttcaccgacgcgcagcgccaggcgacgaaggacgccggcaagatcgccggcctcgacgtcaagcgtatcatcaacgagccgacggcggccgcgctggcctacggcctcgataaggagaccgaccagaagatcatggtctacgacctcggcggcggcacgttcgacgtctccgtgctggagatcggcgacggcgtcatcgaagtgctggccacggccggcaacaaccgcctcggcggcgatgactttgaccagtgcatcaccaactacctcgtgcaggagttcaagaagagcgaaggcatcgacctctcgggcgaccgcgtggccatgcagcgcctgaaggaagctgccgagaaggcgaagatcgagctgtccggcgtgacgagcacgaacatcaacctgccgtacatcacggcggacgcgaccggcccgaagcacctggacgtgacgctcacgcgcgccaagttcaatgagctgaccgcccacctcgtcgaaaagaccgcaggcccggtgcgccaggccatgagcgacgccggcatcagcgcgtccgacctgacgaaggtcctgctcgtcggcggctccagccgtgtcccggccgtgcaggaaatggtcaagaagctcaccggcaaggaaggcttcaagggcatcaaccccgatgagtgcgtggctgacggcgctgccatccagggcggcgtgctcggcggcgacgtcgcgggcgtggtcctgctcgacgtgaccccgctgtccctcggcatcgagaccctcggcggcgtgttcacgaagctcatcgagcgcaacaccaccatcccaaccaagaagagccaggtgttctccaccgcggccgacaaccagacctccgttgaggtcaacgtcctgcagggcgagcgtgagatggccgcttacaacaagagcctcggccgcttccagctcgacggcatcgccccggcccgccgcggcgtgccgcagatcgaggtcacgttcgacatcgacgccaacggcatcgtgaacgtctccgccaaggacctcggcaccggcaaggagcagcacatcaccatcacctcctcgaccaacatgtccaaggaggacgtggagaaggccgtccgtgaggcggagcagtacgccgccgaggacgccaagcgcaaggaagagatcgacacccgcaaccagggcgaccagatggtctaccagaccgagcgcacgctcgaggagctgggcgacaaggtcgacgcggccgagaaggccgaggttgagagcaagctcaacgagctcaaggagaccctcaagggcagcgacaccgcagccatcaaggccgcgaccgaggcgctgacgcaggtgttctacaagctcagcgagaagatgtaccagcaggccaacccgcagggcggccagccgggcgcaaacccgggctgtgacccgaactgccagagcggcgactgctccaagggcagcgacggccagcagtactacgacgcggactacaccgtcgttgacgacgacaagaagtaaacaccccgcccccgtcacgggcaaagcaaagcgggcgcgccgaacaagcgcgcccgcatttggagctttctgacccccgcgcggggggaatccatagacagttgaggttcatgtatggctgaaaaacgagattattatgaagtgctcggtgtcgaaaagggtgcatccgaggacgagatcaaaaaagcctaccgcaagctggccaaggccaaccacccggatctgcatccgggcgataaggaatgcgaggagcgcttcaaggagatcaacgaggcctacgaggtgctgtccgatcccgacaagcgcgcgaagtatgaccagttcggccatgcggcgttcgacccgtccgccggcggccccggcggcgccggtttcggcggcttcggcggctttgacgacattttcggcggcggcttcggggatatcttcggggatatcttcggcggcggcttcggcggcggacagacccagcgcagcggcccgcgccggggcgaaaacctgcgcgtgcgcctgaatatcacctttgaagaggcggcgttcggctgcgagaaggagatcaacgtcggccgcgtcgagcagtgtccggactgcaagggcaccggctgcgcccccggcacgacgccggaggtctgcccggactgcaagggcaccggcagcgtgcgcaccacgcagcgcaccccgttcggcgtggtgcagaccagcggcgcgtgcaagaagtgcggcggccacggcaagatcatccaccagccgtgtccgcgctgcggcggccgcggcgccgtgcgcaagaatcagaccatcaaggtcaagatcccggccggcatcgacgacgggcagacgctgaatctgcgcggcaagggcaacgccgggctggacggcgggccggcgggcgatctgctcatcacggtctttgtcaagccgcacccgctcttcgagcgcgacggcaactccgtgctcatggagatgccggtgtcgttcgcgcaggccgcgctcggcgctgagatcgaggtgccgaccatcgacggccgcgtcaagctcaccatccccgaggggacgcagccgggcagtgtgttccgtctgcgcggcaagggcatcccgtacctgcagagcaagggcggcggccgcggcgaccagttcgtcacgatcacggtcaccgtgccgaagaacatgacatccgagcagaaggagcgcctgcgcgcctatgccgacgcgatgaacgaatcggtcagcgagggacgcagcggcatcttcggcagcaagaaaaaacgctgagtaaataacatagaaagccggccgcagtgcacactgcggccggttttttgcgcaccactggggcaatgcggcgggcaaatacgggctttgcgcgccgcgggatttctgctataatgggcgcagactttttttcgggaggtgcagccatggacacgcacagactttcccagacggtacagccgctgctcgtctggtttcaggcgcacgcacgcacgctgccctggcgcgccgaccgcgaaccgtaccacgtgtggctctcagagatcatgctgcagcagacgcgcgtcgaggccgtgcgcgggtactacgcgcgctttctcgcggccgcgccggacgtgttcgcgctcgcggcgctgccggaagcgcagctgctcaagctctgggaggggctggggtactataaccgcgcgcgcaaggcgcaggcctgcgcgcaggaggtcgcggcgcgcggcggcgtctggcccgacacggtggaggatctgctggccctgccgggcatcggcccatacacggccggggcgatcgcctcgatctgctttgagcggccggccgccgccgtggacggcaatgtgctgcgcgtgtgcgcgcgcgtgctcgacgacgcgacgcccatcgactccgccgcgcacaaggccgcgctcaccgcggcgctgagcgcgtgctaccccgccgggcactgcggcgacttcacgcaggcgctcatggagctcggcgcgaccgtctgcggcccgaaccgcgcgccgcagtgcgaggtctgccccatcgcagcgctgtgtctcgcccgtgcgcacggcacggcggctgccctgccggtcaaggcgccgaagcgcgccaagcgcgccgaggactacaccgtgttctgcctgcgctgcggcgaccggctcgccgtcgagcggcggccggagcacggcctgctcgccgggctctgggagctgccgaacacgccgggcctgctcgacgagcggcaggcgggcgaatacgccagcgggcagggcctcggcgatgtgcggctgcgcagcgcgcgcgacggcaggcacatcttcacgcacatcgtctggacgatgcgctgctacacgctcgagtgctcggccatgccgccgcgctaccattgggccacgccggacgagctgcgcgaggagatctcgctgccgacggcgttccggcagtttgtggacgcagaataacaaaaagccgcccctgtcatgttcgacaggggcggctttgcatttgctcgccgctcagcgccagaagtcgtcgttccggtcgcggtactgcggcggcagggggtactgcatgcggcggaaatagtcaaacaccgtctcgcgcgtgacgcggcggtcgtcgcgtgacgagcggttcacgcgccggatgccgaacacgtacagcgcgatcagatacgcataaaacagcagcgtgaagcggctgtcgccctcctgcgcgaaagccagaaagtcgtagcacccgtgcagcagtatcggcacgacgacgctcagcgcaaggtaggccttcctgtcctcatcgcgcccccagtagtcggagagcttggcatagccgtagaaataacccataaacacgccgaagatcgcgtggccgggcacggccgtgaccgcgcgcacgaggccggtggcgaagccatagctgtagacgtacttcacgttctcgaacgcggcgaaaccgagcgcgaccatgacggcgtagacaatggcgtcaaactgatagtcgaacgccgggctgcgccacgtcgtgcgcaggaagaggaacttgcacgtctcctccgtcaggcccgcgacgacgaacgcctcgagaaaatagccgaggtagacattacgcacgttcagccgctcgatgacggcgctgaggatgagctcgaccacgatggccggcaggcacgagagcgcgccgtagcccaggagcttggcgagcagggccggcggctctttgtccgtgcggtcctttcggtagatatacaccaccagcacaacggccggcagcagcgcaatgaacatcaaaggatcgatcatggggaaaacctccgatcaggaatatgcgggagtaggattctacattgccgttcggcaatgcctcccctgtgcaaggggcagtggcaaaatcgaagatttttgacggaggggttgtaaatacaaatccatgcaagggccgatttatcaatccctcagtcagtctgacggctgccagctccctttgcacaagggagtcaaggggcacaataccagcgaaaaaagcacccacgcgccggtcagaacagcagccagatcagcagcgggatcgtcacggcggacaggatcgtattgagaaaaatgcacttggacgcgaacgcatccgaccggtcatactgcagacacagcgccgtgacgaccatggccgacgggcacgccgcgagcagcaccggaatgccgagcagcgcgccgctgacaaacggccgcagcaccaaccacgtcagcagtgggcacacgagcagccgcaccgccgacaccacgtagacccgccagtcggcgagcgcggcgcgcacggagatcgcgccgagcgacgtgccgatgatgagcatcgacagcgggatcgtcgcgcccgcgagcgtggagatcgtgtcggcaatgacggcgggcacatggatgcgcgagagcagcagcacgaccgacagcagcgtcgcaatgacgggcatattgagcaccttgcgccagtcgaagcgcgcgcccgcgccgccagagagctgcgccgcgccgatggaatagagcgcgaggttgaacgggatgttcgccagcgaggcgaaaaagaccatctcatcgccaaagatcgccgcgacgacgggcaggcccacaaagcccacgttgccaaacgccgtcacgagccgcgtcgcacccacgtcctcgccgcgtgtgcgcagcagccgcggcagaaaccacgccgcggcgatctgcaaaacggtcgcagccgtcagcacgaggacgtaatcgacaatgtcgcggccggtgaaatccggcacgctcagcacggaattgaggatcgtcgccgtgagcaggacgttcatcaccagcggcgtcacgcgcttattaaactccggccctgtgatgccgatgcgcgcacaaaggtagccaaggagcatgatgagaaccagcatggccatcttggcaaaaacaacggacagattcatttttctctttttctctcttttctcggattctctcgtcgggcggcgcatggtgctgcctacccagtttagaatagtatatgccagacatcgtgtcttgtaaagcggaattctcaacgggtacttgccaaatgccgcccggcctgttacactggcaggaaagggggtgtgcgcatgaagaaaaccgtcatcaccattatccgcatcatcgtcatcgtcgccattctgggtctgctgacctacggcggcttcgtggggatgaaccgcgtgtccggcactggggactacaccatcgaccagtacgccgcgaccgacgacggcggtctgctgaccgtgacgaagggcggcacggcgctgcacgtcaagtgctcggccgaccagcttgccgtcgttgagacgcagccggacggcacgttccacctgtcgttctcctacagccagatcacgaacaaaggcacgctcaaagacatcacgcccgccgggtaacaaccggccgggcgcgatccttaacaattctgaattttacgcgcacgcttgcaaaatgcccgccggagcgcgtatagtaaaggcagtaattaacagattttcggaaaccgaatggtctcccggaggtgacttcgtatgcagacaaccgacccccgccgcaccccgcggcccgacagcgatgcacacacgccgaagccggacgcggccgaccggccgcgcccggccagacgccgcgcgccgcagcgccgcggcccgagccagtcgacgctggtgttcgcggccgtgctggtcgtgatcgtgctggtggccgtgctggtgctcgtgctcgtgagccggcatgaccgcgcgcccaaaaacgatcccgccgcgcaggccacgcccaccgcgcaggtcacggagcaggacaccgtgctcgcggaggcgaagcacctcgccgcgcagtatgactatgacaaggccatcgccgccgtgacgggctttgccgggtgggagaacgtgccggagctgcagcaggccaaggccgattttgaggcgcagaaggcgcaggccgtgcgctacgctgaccccacgaccattccgcacatctttttccacacgctcatcgcggacactgcccgcgcctttgacggcgaccccgagcagggcggctacaaccagttcatggccacgatcaaggagttcaacgccgtgctgcagagcctgtacgagcggggcttcgtgctcgtggacatccacgacgtcgccgggccgcagcagcaggccgacggctcgacgaaatacgtcgcaggcgacatctacctccccgccgggaaaaagcccatcgtcctatcgcaggacgacgtgtgctactacgaatatatgaccgacagcgacagcgacggcaagcccgacaaaggcggcgacggctttgcctcgcgcctgctggtgaaagacggcaagctcacgtgcgaatacgtagacgccgacggccagacgctctacggcagctacgacctcgtgccgctgctggatgatttcctggaccagcacccggacttttcctatcgcggcgcgcgcgcgaccatcgccgtgaccgggtatcagggcgcgttcggctaccgcatcagcaatgattataaggaaaagctcggcgacgaggcctttgcgcaggcgtgcacggacgcgcgcgccgtggccgacgccctgcgcgccgagggctacacgatcgccagccacagctacggccacctgacctacggcgacatttcgcccgagcgtctggccagcgacgcgcagaagtggaacgatcagattgcggccgtcatcggcgagaccgacgtgctgctctaccccttcggcagcgacattgccggcgtggaggcctacaagggcgcaaagtttgacacgctctacggcctgggcttccgctatttctgcaacgtggactcggccgagcactgggtgcagatccacgacgggtatgtccgtcagggccggcgcaacatcgacggctaccggatgtactaccagtcgaatctgctcgacgacctgttcgataccaagactgtctgggacgatgcccgcccgacgcccgtgccgaagatctgaccggcagcgccgcaagttccagcccaaacacgacaaaatcccctgaccaaacggtcaggggattttgtttgggatgggaaaaataaaggggggaatttatcgaccaatcagtccttgcgctcgtcgccccagaagaacagggccacggtgcccgggccggtatggctgccgatggtggtaccgacgctgtagatctcgaccttcccgttgagcttcgggaacttcttttcgatctcgtcggccacggcgcgcgcgtcgtcatagcacgccgactgcgagatgtagcacttgccggagtagtcgaggccgccctgcgcatgctcttccatgcgggcaacgatctctttcatgacgcgcttcttgccgcggatcttggagcgcgggatgagccggccgaggttatccatgttcagcagcgggcagatatccagcagaccgccgaacacgccggccaccttcgagatgcggccgcccttgacatagaacgtcaggtccgtggagaagaaccagtggtgcagctccagcttgtgcgcctcggcccagtcgcgcacgccgtcgatggacacgccctcgtcgcgcaggtcagccaggcggtccatcagcaggccgtagcccgaggacgcgccgagcgagtcaacgatgtagatcttccggtcgggatagcgctcgcggacgatgcgcgcagcgttctccgccgagttcgacacgccggacaggcccgaggacaggcagacgtgcagaatgtccttgccctgctcgagaaacggggtgaaatagtccacgaactccgagatgttcacctgagaggtgcgcgtctcggcgccgtttgccatggcggcgtaaaacttgtcaaacggcatcgtctcgcccagatcgtccgggtaatccacgccgtcgagcgcatagtggaagcagatatacgaaatgtcacgctgctggaaatgctccttggtcaggtcggcggtggagcagcagctcagtacgaaatcggccattttgtcggtctcctttgcatccttcgatttgcccgtcgggcgggcaggtgtgattccttctcaacatgaatatggtggtatcatacctgccgtgccggcattgcgcaacctacaaaatggaaccggggcgtagaacacggccctgccctgctctacgccccgaaagacgcactctacaaatcatagaatgtctgcaatatcaatgctttgcgcggatgttgaaactgaaatacacgacggcctccgccgggatgaggatgaggaaaagctgccagaaattcatcccgaagcgcagcagcacgaggtagcccacggcgaacacgctcgccacaaggccgagcacgacataaaggtttccccgtccgttaaaaaacacgctgttgagcacaagatacgtaatgagcgccgccggcacgaagcaaggaaacacgacccactccaccttgcccagccacagccacagcaccacaaacaccagcaccgccagcgtgacgatgcccgtgagagcgacctgaatgatggaggcgtggctgcggtcgcgcacgtcggcgggatcgggtgccggctgccaggcatcgtgctcgtcgagcagataatcgaccgtgacgccgaagatctcgctcatgcgcttgagcacggccgcgtcgggaatggcctcgccgcgctcccacttggagatcgacttgtccgaataattcagttgttcgccgagctcggcctgcgtcatgcccgcggccgtgcgcaggcggatcaggttgctggcgaagatgagtttcagttcatccatgacggcgacctcacgatggttttatcctgtctattttacgcacttgcgcgcgcgttgtcaaccgtcacgtgcgccagacgatctcctcggccgtgcgcgcggcggtctgctcgtcggtgagcaggcgcacgagctcgagcgcgaacgccatcgctgcgccgagggcgcggccggtcgtgatcggcccgtcggtaacgacgtcggcatcgaccatgtgcgcgccggtacaccggttctcaaagccggggtagcacgtggcgcgccgtccggcgagcaggccgtactgcgcgagcacgctcggcgcggcgcagatggcggccgcgcggccgccgtgctcgagcgtgcggcgcacgagcgcctccacggccgggctcttggccagattcgtcgtgcccggcatgccgcccgggagcacgacaagctccggcggcgctgccagcagctccggcagcgtgcggtcgcacgtgatgggcacgccgtgcgcgccgacgacggtgtgtgcgtcctgaatggacaccgtgtatgcctccaggccggctcggcggaggatgtcgagcgtgacgagaccctcgcactcctcaaacccctcggcaaacagcagatagcattttgacatgatgatgttcccctttccttcaaacaaccgcttacataagcggcgcgacaagcttcagcagcgcggccgcgatgcgcgtgtgcagcgggatgcgcgcgaggtcgccgtgcgtgacgatctgcgactgggcgcgtgtggcgtcaaaatccgccacgatgtccttgatacacgggcagtcatagagatacaccgcgtcctcaaagtgcaggtacagactgcggtaatcgaggttgatcgtgccgacgacggccttgcggtcgtcgctgacgaacaccttcgcgtgcacgaagccgggcgtatactcatagatcttcaccccggcgtcgagcagctcgcggtagtgccccttggcgagggcgaaggcgaacttcttgtccggcacgtgcggcaaaatgagctccacgtccacgccgcgcttggccgcgaacgtgagcgccatgaccatcgtctcgtcgaggatgaggtacggcgtgaagatgcgcacatagcgctcggcgtggttgaggatgtcgagatacacgcactcgcccacacgctcgtcgtcgagcgggctgtcggcatacggcaggacgtagccgcccgcgcccagcagcgggcgcaggggcacattgagatagcggccgtaggaatcggtgtccggctcgcgctcgtccatgccccacatctgcaggaacatgagcgtgagcgagcgcacggcctcgccctcgagacgcacggccgtgtccttccacacgccgtagacgctcacgagattggcatattcatcggcgaggttcacgccgccggtgaagccgacgcgcccgtcgatgacggcgatcttgcggtggtcgcggttgttataatacgtgctcacgagcgggcgcagcggcgcgaacatcttgcagcggatgccgagcgcctccatgcgcttgggatagccgtacggcaggcggtagaacgtgcacgtgccgtcatagagcacgcgcacctcgacgccggcgcgcacccgctcctccaggatcttcaggatacggccccagacgtcgccctcctcgatgatgaaatattcaaggaaaatgaagtgctcggccgactgcagcgcctcgatgagcgcgccgatcttgtcctgccccatggggtagtaggtgacggcagtgttttcatacacggggtagtcgccggagcgcagcgtgtactcggcgaggttgtgcacctcgggcagctcggtgcgcaggtgggccatgagctcggtctggcgcgggacgtactgcacggtgctcaggatgctctcctgcacgcggcggttggcgtagcggtggccgatatcgagctgcacgaacaggtacagcagcacgccgaacgcgggcagcgccatgacgaggatgatccaggtgatcttcgtcgtcgcgctgccggacttgttgacgaggtagatgatgaccgcgacgctcatcacgcgcaaaacgatcgtcaacgcggggtagtagcggccgagatagtgcgcgccgagcaccatgatggcgatctgcagcacgagcagcagcgtgatgaccatcgtgcggccgaacacaatgtcgagcagccggcgcttgccgcggtgcagcaggcggatctcattgtcgtcctcaaaccagtctttgtgcacgcgcgcacctcctttcgtgttgtcatctttctatcatatccgaaatcccggaaacggtcaagggacattccggtcgattttcctgcggcgcgccgcggcgggaaaacaacagcggcgtcacggaaacagctccgtgacgccgccgcgtcggtgcgcgcacttaacgcttgcgcttgtttttctgatacagggcccacaggccgttgagcagcaggttcttgtcgtacgtgatctcgcgccggcagtacgggatgatgcagccgccgaggccgccggtcgcaatgacggcggcgggctcgccgagctcggcctccatgcgctcgatcatgccgtcgagcatggccgccgtgccgtagacgctgccggagcgcatggcctcgaccgtgtcggtgctgatgcactttttcggcgcgtcgagcgagatgtgcggcagctgcgacgtgccgtttgcgagcgcctcgagcgagatgcccacgccggggatgatcgccccgccgagcacgcgcgcctcacggtcgatgacggtcatggtcgtggccgtgcccatgtcgatgatgatcagcggcgggtcgtggatggccagcgcggcggccgcgccgacgacgaggtcgctgcccatggtggcgggattgtcgagcgcgatgttcagccccgttttcatgccggggccgacgacgagcgggcggatgcccgcgatcatgcgcacggcggcgatgagcgcgccgttgatcggcggcacgacagacgacaaaatcgcgccgtcgatgtcctccggcgcgatgccggaaaactcgatcacctgccgcagcgagatggcgtactcgtgcgcggtcttgtcgcggtcggtctccagacgggcaatgttgcggatgccggactcgtcgagaaaaccgatcacaatattcgtattgccaacgtccagagccagcagcatatcagtccaccgggcctttcttgccggccgcgatcagccgggtgatggtcgggctcaggacgaggttcacgcccagctcgagcaggaagttcacgcccacgagacccgtaacgacatacgttgccacagccgtgccgccggcccatgcctgcagctgcggctgataaaacagcaccatggcgagcacgaacagcccggtgttgacgaccggggcggccgcggccgcgacgatgacgcccgcgagcgggtgctttttgccgatggcgcgatagagcagaccggccacataacctgccgccgtgcccttgatgaggcagacgagcacggtcatgaccgggcgcgcggaaaacatgatgtagccgccctgatcggcgccggtgacgacggcgatcgtgacgacgacgccaaacacgaagccgagccacgcgccggcgctgacgccgtaaacggctgcgccgaccacgatcgggatcagcacgagcgacacggcgaacgggccgaccttgatgaagctgccgagcagctgcagcacgacgacgatggcggtgaagagtgcaagcccagccagacgccgggtcttaccattgctgttgttcattttttatacctcctaagctgctgttcccgctccgggcgggatatagcgcaggagtatcttacccaatccggcgcaaaaaatcaagagcggacgcgcaaagtttgcacgtccgcccatgacaaaattttatgacgggatcacttcagcgcatccacggtcgccagatacagggcatccgacccgtcggacggcatgctgaagccggtgcgcggcgagaagctgaagccgttgagcgtcgggccgtcctgcaggcaggagcgcttgaactgctggctgaagaggcgacggcagtagctgcgcagccactttttgagcgtcgcatggtcaaactcgtcgccgtaggcgatgtcggccaggcgcagcaccttctcgggtgcgaagccgtgatcgaccaggtagtacaggaagaagtcctggaggttgtacgggccgacggagtcctcgctcttctgggcgatctcgccgttgcgcgtcgggggcagcagctcggggctgaccggcgtgtcgagcacgtcgagcagggccttggcgagcactttgtcgtccgtcgtctcggcgacgtagcgcacgaccatctgcaccatggtcttggtcgagccggcgttgacgtcgtacatggagatgtggtcgccgttgtaggtgcaccagccgtcggcaaactcgctcatgtcctccgtgccgacatggatgccaccgtcggcaaagccgttggccacgtccatgaggatctgggtgcgctcgcgcgcctgcgagttttcgtatacgacgttgcggttttcggggtcgtggccgatgtccttgaagtgctgcatgacgctctcgccgatgtcgatgacgcgcacggtcgcgccgagctgctcggacacgatgatggcgttggacttcgtgcggtcggtcgtgccgaagcacggcatggtcacggcggtgacgtagtcggccggcaggcccatcatcttcacagcctcggcgcagatgatgacggcgagcgtggagtccacgccgccggaaatgccgacgaccgggtgcttgagattggcatactgcatacggcgcacgaggctggcggcctgcatgtgcagcaggcgcttggccgcggcgtggtaatcggccgggtcgtccggacggtaggggtacttgccgaacgggcgggtgagtacggtctcctccacgccctcgccccactcggtgacgacgtaggatgcagcatcgccggtgaaggtcgcgtccttgcggcgcgcggcgatgagcagctgcacgtccagctccgtcacgacgtcggagcagccgtcctcggcgctctcgagcaccttgccgtcctcggcgacgaggcacaggccggaatacgtcgcgtcggtgctcgactcgccgaagccgggagccgccagcacgacgccggcgtgcagcttcgcgctctcggcgcgcacggcggtggtcacgcggcaggcggagtccgtcgccatcgggaagcccgccatctcgacgagcacggtcgcaccggcgagcgcgtggcgcacggccggggacaccggggcggacacgtccgcgccgacgagcacggcgacgttcagctcgctgactgtgctgtgctggaacagctgctgcgggtggaaatcgaccgggccgagcgagccgatctgaatatcgtcgagcagcgcgccgggcagggcgaagtgcttgtcgcccgggcagctcgccggcacgacaccgagcagctcgccgttgcacacggcggccgccgcgtcatacaccttcgcgccctgcgcgaccggcaggccgacgaacacgagcatgtccttgccctcggacgcctggacgaccttttcgagcgcggccgccgcgcctgcgagcagggtgttctgatagaacagatcgccgcaggtagcgcccgtgagcgtcagctccgggaacacgagcaccttcacgccgaggcgtgcgtgctcgtccatggcgcggatgacggcatccgcattgaacatcggatctgctacccggatctcgggagcagccgctgcaaccttgataaatccgtgtttcatgttgattcttccttttctctaattctaatttgctttttcaaatgtaaagagcgccgcgtcgtaaaacttcagcaccgcgccgcgcacgggcacgtattccttttccgacgccgtgacggtgacggtctcgtcgcccgcctcggcgcgcgcggtctcgtcgagcacgggcaggacattttcattgagctcctgcgcgagctcgtcgaggtgctgggcgtagtactcgctgtcgtgcggcggggtgtagcccggcacgggatttgcgccccgcgtgaggcaaaacacgatcatcagcaccgacagcagcagcacgaagccgccgcccacgggcccgagccagcgggcgatctgcgcgccgggctcttccttcacggtcgggtccggcggcgggacgatcttcggcatggtttaaaaccggatgcgcgcggcgatgtagtcctcgagctgctccatggggatgcgctcctgctgcatggagtcgcggtcgcgcacggtcacgcagccgtcctctgcggactcaaagtcgaacgtcacgcagtacggcgtgccgatctcgtcctggcggcggtagcgcttgccgatcgagcctgcctcgtcatagtcgcacatgaagcgcttttgcagcttgtggtagagctcggtcgcgggctcggagagctttttcgacagcggcagcaccgcgcacttgaacggcgcgagcgccgggtggaagtgcatgacgacgcgggtgtcgttcttggccgcgtccacgacctcctcgtcatacgcctcgcacaggaaggcgagcgtcacgcggtccgcgccgagcgacggctcgatgacgtaggggatgtagtgctcgtttttctcctggtcgaaatagtccatgtcctgaccggagaacttctggtgctgggtcaggtcgtaattcgtgcggtcggcgacgccccagagctcgccccagccgaacgggaacagatactcaaagtcggtcgtggccttggagtagaagctcagctcctccttctcgtggtcgcgcaggcggaggttctcatcgtgcatattcaggcccttgagccactcgtggcagaagctgcgccagtagtcgaaccacgcaaggtcagtgtccggctcgcagaagaactcgagctccatctgctcgaactcgcggatgcggaagatgaagttgcccggcgtgatctcgttgcggaagctcttgccgatctggcagacgccgaacgggatcttgcggcgcgtcgtgcgctggatgttcttgaagttgacgaaaatgccctgcgcggtctcggggcgcagatacacctcggcggccgtgtcctcggtcacaccctggtgggtcttgaacatgaggttgaatttgcggatatcggtaaagtcgctcttgccgcagcccgggcaggggatcttctgctcgcggatgaaggcgaccatctcgtcgttggtcatggcctcgacgttcacgtcgggcatggggttctcggccagccagccctcgatgagcttgtcggcgcggtggcgcatcttgcaggacttgcagtcgatgagcgggtcattgaacgtcgtcacgtggccggaagccacccagacctgcgggttcatgaggatggcggagtcgagcccgacattgtaggggttttcctgcacgaacttctgccaccaggcgcgcttgacgttgtttttcagctccacgccgagcgggccgtagtcccaggagttggcgaggccgccgtagatctcggagccggggtacacaaagccgcggttcttgcacagagcgacgatcttgtccatggttttttcggtgtttttcattgtttttcctccctgctccgccaatggcgatggcggaagccaaatgatctccgccgatggcttcggcgggacgcgcccggccggaaatggcccgatcggacaattttatattatagcaccgcgcccaccgtcctgcaaggaatgacacaacgttaacacgggccgggcgcgggcgcgcaatttgggttgcgttcttccggaatccatgttaaactacccttacccccagccgtcagccgggggtactcataaaggtaaaggagagatttccgatgtccatttccgttggcgccgtcggcactgcttcgaccgtcgtgacgcctgaaaataccgcggccgcggtcggctccggcgcgctgccggtgttcgccacgccgtatatgatcgccctgatggaaaacgccgcctgcaacgccattgccgatggcctggaggaaggccagagcagcgtcggcacgaagctcgacgtgtcgcacgacgcagcgacgcccgttggcatgcacgtcacggccagggccgagctcgttgaggtcgaccgccgccgcctcgtgttccgcgtcacggcggaggatgacgccggcccgatcggtcagggcacgcacgagcgctttctcatcatggcggacaagttcctcgccaaggcagaggccaagaagggctgaggcccggccaacgccaagacgaccggcgatgcggtcatggaaaaagattcacaaaatgtccctttctttttgccgcaaaaccggttacactgtagtcaacagatccggggcgacccggagtggaaaacctgaaaggagtggcgttttatgaagttcacgttcatcgaaaagaaaatggccccgtccgattccctgcgtgcgtacgcggagaaaaaggtcagcaagatcgaccggctcttccgcaccgaaagcgaggcaaacgtcaccttcagcacggagcgcggccgcttcacggccgagatcacgatcaagaacaacggcacgttcttccgcgcccacgagacgacgagcgatatgtacgcctccgtcgactccgccgtggcgacgatcgagcgccagatccgcaagaacaagacccgcctggccaaaaagctgcgcgagggcgcgtttgagcgcgaggtgcagccggagtacgtccccgcggacgacacggtcgaggccggtgcgttcgaggtcgtgcgccgcaagcgcttccccatcaagcccatgagcgtcgaggaagcgatcttgcagatggacctgctcgagcacacgttcttcgtctttcgcgatgtcgcggccgacggcgccgtgtcggtcgtttaccggcgcaaaaacggcggctacggcctcatctccgacgaagcggagtaagcagcatcccgatcccataaggtccctgcggcattgccgcagggacctttttcgcgttcttgcattcccggccccgctgtgctatcatcggcgcaggaaaacgcacaaaggaggcaatgcccaatgcaatggatcgaagtgtccgtccccacccgcagcgacgagatcgacgacgtctgcgcgcagctggccgagctgggcgcgggcggcatggtcgtggaggatgagacggattttcagcagtttttggagcagaaccatcagtactgggactatgtggacgacgcgctcgaggcgcagtttcgcggcgtgtcgcgcatcaagttttaccttgccgacgatgacgacggccgcgcgcagctggccgccatccgcgccggtatcggccgtgagctgacgaccgcaaccgtgcgcgacagcgactgggaaaataactggcggcagtactatcagccaatcgagacaggcgaacggctcgtcgtcgtgcccgagtggctcgacgcgccggcggacggccgcctgccgctgcggctcgaccccggcctcatcttcggcacgggcagccacgccacgacgcgcatgtgcctcgccgcgctcgagcactgcgccggcgtggacaagacggtgctcgacctcggctgcggcagcggcattctcggcatcggcgcgctgctgctcggctgcgcgcacgtcaccggctgcgacattgaccccaaagccccggaggtcgcggcagccaacgctgcgctcaacgggttttatgacgacaagttcaccgtctgcgcgggcgacattcttgccgacgccggtctgcgccgccgtctcggcacgggatatgatatcgtgctggcgaacatcgtggccgacgtcatcatcccgctggccgcgctcgccccggcgtttctcgccccgggcggcacgttcgtgtgctcgggcatcatcgacgggcgcgaggacgaggtggccgccgcgctcacgcgcgcgggcttcaccgtcacggcgcacgacacgctcgaggagtggcactgcttcacggctgtgctggcgtgacggggtgcagtgcatcaccgtggacgccggaaggtccggatctggaaagccttcccctgcggctcaatttcacagcgcagcagcatcatttttacccaaacatagaacaaaccccagatggttttacccatctggggttcgtcggcttgctgcgcaagcgcgtgtcattccacccgaggcgggccttgccccctcgggcttccccgctgctcaattccgcaacgcagcagcaccatcctaacaaatatagaacaaaccccagatggttttacccatctggggttcgttcaatagagaggagaatatgaggagggagaaactagcaaattaagagatgtcgttcgtatcgacgagcttgacgtcgacgtcgaacgttttgccgtcgcggtagatggtcagcgtgacggtgtcgcccaccttcagcccgtccttcgcggcgctgacatcataggtggtggtcacggcctgaccgttgacggccaacagcatatcgccggactggatgccctgcttttcggcgtccgagccctcggcgacggcgctgatatacagcccatcgggcagatcgtagtattcggaagcggcggaagacacagcgcccacggtgatgccgatgctcacgcggcctgaaacgcggccgtctgcgagcagcgcattgacgatcgggcggatggacgcggtcgggatcgcaaagccgatgccctccacacccgtggacagggccttcatgttcgtgataccgatcacctgcccatacatattgatgagcgggccgccggagttgccttcgttgatggcggcattggtctgcaggagcgtcatgctgtgcccgttatagaccatgtcgcggttgatggcggagatgatgccgttggtcatcgtccagcgcagctgttcgccgagcgggttgccgatggacacgacgtcgtcgccgacctgcagggaactggagtcgccgaattcggcgggcgtgaggccctgcgcctcgatcttgagcacggcgatgtcgctcacggcgtccgcaccgacgagcttgccggtgtactcggtaccgtccgaggtcgtcacggtgacggccttggcgccgtcgagcacgtgcgtattcgtgacgatgtagccgtcggccgtgagcacgatgcccgtgccggtgctgtattcgccgcggcggatgtcggcatggatgccgacgacggacggcaggcacttggcatacacgctctgcagcgtgagcgcgctgcccccggcgggctggagcgtcatggtcacgccggggtcggtcggcgcggtcggcagctcattcttgccggtgacggtggtgtcatcgtccgtgtcctcgcgggggagcgtcacgctgccgtgctggcccggatcgccgtcgacggagatggaatcccggccgcggccggcgaacacatagcaggacgcgatgatgagtacgagcacgccgaggatgatcatcgtgatcttcagcccctgatggggctttttcttcggcgcggcggcctgcgacgggctccagtaggagtcgtagcagccggtgcctgcggcatcggtgcggggcgcggtgtagccggcctcataccagtcggactccggtttgcggacgttgtcgtacattgtggtgtccctcccaaggaacgatttgatgatagcacgtgattttgtgctgcttatgaatggaaaacaaacattttatgaattccgcgaacaaatcatgaactcttgcgcccgccccggcggccggtgctctcgggcttggcggtaggcttgggcgcgggctttgcgagcgtgagcgtgaacacgaactccgtcacaccgtcgcggctcgtgacggcgatgtcctcgccgtgcgcgtcgaggatgctcttgaccaggtacagtccgagccccacgccgtcgcggtcgaggctgcggctgcggtcggacttgtggaagcggtcgaagatgaacggcaggtcgtcgggcgggatggtctcgccgtggtcgcgcacggagacgtaggccttgccctccgacttccagagcgagacgcgcagcgtgctgccgggcgcggcgaacttgacggcgttgtccatcaggttatagagcacgcgcgtgatggcgtccgggtctgcgagcaccggcatggagtcctcgggcagctgcagatcgacgtcgagctgcttgtcgttggcgcgcgcctcaaagctgagcatggtgctgacgatcttctccgagatgtcaaactcgcgccggcgcgtcagatcctcgcccgtgctctcaaggcgcgacatgtcgagcatgctgcgcacgaggcgcgagagccggcgcgtctcgtcggcgatggtggcgaggtacttgtcctcctgatccttggggatcgtgccgtcgagaataccgtcggcaaagccggcgatggtggtcatgggggtcttgagctcgtgcgagacgttggcgatgaaggcgttgcggcgctgctcgctcgtctcaagggagtcggccatggtgttgaaggccgagatgagcgcgccgacctcgtcggtgcgtccgtcgtccgtgacgcgggcggaaaagtcgccgtgggcgaacttcttggccgcgactgccatctcgtcgagcggctgagccatgcgcttgctcgtcacgagcgagagcagcagcgcgatcatcatcacggcggcagacgcggcgagaaacacccacacgaacgttcgccagccgtcgatgatcgtggcgctgttcgtggccacgaacacgtagccgatcacgcgcgcgtccgtgccgatggtgattggctgcgcgacgacgtagtgcggcgaggcataaaacccgccgaggttcgtgatgaggttgagcttgccgtcgctgcgcagctgcgtcagctgcgccgagccgaccgagcggccgaggtgctcgcaggcgatgttgcggcacgagcaggacacgatcgtcccatcggtatccgtgatgaagatgtggttgccggtcgactgcgccagggtactgatgaccatgcgcaggtcccagttcgagagctcgccgtcgcgcacaagcgcctgcgcggcgtggctgacctcctcggcgttggagaccatgttgtcgcggtattcgctgatgacatagctgcggccgaggaacacgaacgccgtgccgaggatgaggaagctgaacatgaccatgacggcggtcgcggcgaagtttttgaaataaatactcttcacttacgtctcttccgcttcgaacttatagcccacgccccagacggtcttgagcgcccacttgtcggacacgccctcgagcttctcgcgcaggcgcttgatgtgcacgtcgacggtgcggctgtcgccgaagtagtcaaagccccacacctcgtcgagcagctggttgcgggtgtagacgcggttgggcgtcgccgcgaggtggtacagcagctccatctccttgggcggcgtgtcgatcttcttgccgtcgacgatcagctcataggagtcgaggttgatgacgagcttgtcgaacgtgagcttcttgctcttgggcttgccgtcgtcgccggtgcggcgcagcacggcgtgcacgcgcgcgagcagctccttgacctcgaagggcttgacgatgtagtcgtccgcgcccatctccaggccggagaccttgtcctcggtctcgcccttggcggtgagcatgatgatgggcattttcatggtcttgcgcagctcgcggcagacctgccagccgtccatgacgggcagcatgatatcgagcagcacgaggtcgggctggatctccttggccatctcgacggccttgccgccgtcggccgcgtgtgagacctcgaacccgtccttctgcaggtacagacgcagcaactctgcgatgttgttgtcgtcctccacgacgagcactttctggctcatgtgatattgcctccttcgccggcgcacttgcgcgccgggtatcattttcacaatttgttcttattataaaacaaccggcacggcgttttcatgtccaatctgtaaaatccgcgcgcccatgacccccgcgcgcacgcaaaaggcatttacaagaccggaaaaatgttgtatggttatctgtatcctttattttgaacgaacagcgaggcaaacgcatgaatacctatggcgaacgcgtaaaagtgacgatcttcggcgagtcgcacggcccggcgatcggcgtcgtgctcgacggcgtcccggccggcgaggccatcgacatggacgccgtgcgcatccagatgcgccggcgcgcccccggctcgtccgacctgacgacccaccgctcagagacggacgatccgctcgtgatgagcggcatcctcaacggcgtgacgaccggcgcgccgatctcggccatcttccgcaacaaggaccagaacagtgcggcctaccacccggagatcccgcgcccgagccacgcggactacgctgcgaccgtgcgcttcggcggccacgccgacctgcgcggcggcggcccgttcagcggccggctcacggcctgcctcgtgttcgccggagcagtctgccggcagatccttgagcgccgcggcatcacgatcacggccaacgccgtgcgcgtcggccaggcgacgggcagggagctgaactttgacatgaagcgcgccattctcgacgcgcgcagcgccggcgactccgtcggcagcgagctcgagtgcgtcgtcacgggcgtacccgccggcgtcggcgggctgctcttcggcggcatggagagccgcatcgccggcatgctctatgccatccccggcgtgaagggcgtggagtttggccgcggcttcgccctcgccgaaatgcgcggcagcgaagccaacgaccccatccgcctgaaaaacgggcacatcaccatggcctcgaacaatgccggcggcatcaacggcggcatcaccaacggcatgccgctcgtcgtgcgcatggccctgcggccgacgccgtcgatcgcgtgcgagcagccgtcggtcgacctggccacaatggaggagacgccgctgcgcatcaacggccggcacgacccgtgcctcgccccgcgggcgatcccggtcatggaggccgcgctcgcctgctgcgtgctcgacgccatgcttgacaccgccgccacgatctgagaaaggagttcctcatggacgaaaacaagaccccggctcagcaggcccccgatacggccgcgccggaaaccacaaacatcgaacagactacccagccggaaaccgccccggcttcggaaggcacggaagcaccgaaggccccagaggccccggaaacagccgcccccgcgcagaaggccgagcatggcgcacgctggcgtcacgcgctctggcgcggcatcgcgggcgtgctggcggccgtggtgctgctggcggcctccggcttcggcgtgttccgtatcgctaagggcgcgcagagtatcgaaggcacgttcgacgccgaccccggcacgttcgtgcagcacgacatcatcttcatcctcgacacgttcgaagaccccgccggcggcagcgcgcagtacgccgtcgtgcccatcggcgggcagctcgtggccttccgcttccccgcgcggtgggacgcctcggtcaagaccattgccaatgcgaccaccagcgtcctgcagggccagagctactccatcgacagcttcatccgcgtcaccggcacggtcaaggccatgccggaggccgtctcgtccgagatctacagttggtacacggacaaccatgactatctgcagaagatcggcgcgatcggcgacagtgacgacgcggccgactacctgcccgacgccatcgtgcgcgtggactacgtcggcggcatcccgcagggctgggtcgaggggctgacggtcgcggccgttgcctgcctgatctatgccatcgtcgtgttcatccgcatcctctgcggcaagtatgacgagcagaagctgccggacatcacgttcgagctcgtggacatgacgcctgagaccccggccgacccggaaaccacaccggaggagaccccggaggccgcagccgagccggagaccgctccggaggaaacgcccgaggccaagccggaagcggaaaccccggccgaaccggaagccccggaaaccccggccgagcctgaaaaatctgacgaaaccgaggacacgcccgatgcctgagcacaaactgtgcgtgccgtgcctgttcgggctcgagggcccgctcggcaacgagctgcgccacatgggcctgcgcggcgtcatgcccgaaaacggccgcgtgcgctgcacgggcacggacgcggacatcgcgcgcatgaacctccgctgccgcttcggcgagcgcgtgctgctcgagctgggcagcttccccgccccgacgtttgacgcgctcttcgagggcgtgaaggccctgccgtgggcgcagtacctgcccgcggacgcggccttccccgtcaagggctacagtctggagtcggcgctgcactccgtgcccgactgccagaagatcatcaaaaaagccgtcgtcgagtcgctcaagcagcgctatcatgtgacgtggtttgccgagaccggcgcgctgtaccagatccagttctcgctcgtgcacgacacggccacgctctatctcgacacgaccggcacgccgctgcacaagcgcggctaccgtccggcgcacgtggccgcgcccctgcgcgagacgctggccgccgcgctcgtggacatcgcgggctaccgcggccggggcgatttctgcgacccgttttgcggcagcggcaccatcgccatcgaggcggcgctggccgccaagggccgcgcaccggggctgagccgcgactttgcggccatgcagtgggcgtggctgccggccggggtctggccgcaggcgcgcgaggaagcgcgcgcacgcgagtttcacggcgagtatcacatctttgcctcggatatcgacccccgcgccgtcgccatggcgcgcgacaatgcccgccgcgccggcgtggacgactgcatcaccttcgcggtggcggacgcgcgggaattcgcgcagacgaccgaccgcggcgtcatcgtcacgaacccgccctacggcgagcgcctgatggaaaagcgcgaggccgaggcgctctacaccgccttcggtgcggcctatgccaaaacggagcactggcggctctacctgctgagctcgcacacggagtttgagcgcgcgttcggccgcccggcggacaagaagcgcaagctctacaacggcacgctccgctgcgacctgttccagtacacgaaagacgtgtgaagccgcatatccgacgcacggccgcatatatttcacaccggtagttaaaaaatcgcaaatattcacattcccctcttgcgcgtccccgccgaccggggtatagtaatggtattattttgtcgaaagtgcaggaatggagctatgaaacatctgttcatcgtcaaccccgtcgccggcggcaaggaccggcatgaatacgtggccgagcaggcgcgcctcgcgctcgagggcagcgcggacgcctatgaggtctacatcacgaccgcgcccatggatgcgtgcgcgaagatcaaggccgaggccgcttccggcgaggagctgcgggtatatgcctgcggcggcgacggcacgctcaacgagtgcgtcaacggcgccgtcgggcacgataacgtcgccgtgacccacttcccctgcggcacgggcaacgacttcatcaaaatgttcggcgaggaaaaggaccgctttttcgacctgagcgatctcgtgcgcggcgaagtgcgtccgctcgacgtgatggagtgctgcgggcgctacgcggtcaacatctgctccgtcggcatcgacgcgcgcatcggcaccgaggtgcaccagtatcacgacagctatgtgctgtccgccgtggccaacctcttcaagggcatcgcccaaccgctgaccgtgcgcggctgcggcatggactacagcggcggcacgtcgctcatctgcgcgtgcaacggccggttctacggcggcggcttcaaccccatcaccgactcccggcccgataacggcaagctggagtttctcgtcgtgcgcgacgtgtcgcgcctgcagttcatccggctcgtcggcaagtacgccaagggccgctaccgtgagttggaaaaattcatcacccatctcgagggcgatcatctcgagatcgacagcgagcaggatctcgtcgtgaacatcgacggtgaggcgctctggagcaagcacgtaaacttcgacctcatccccggcggcgtgaacttcctcgtgccggcgaacatggccttcttccaccccgagaccacgggcggccacgagacgcgcgaatttgtccacgcctgacgaaaaaacgcggtcacaaaacgtttacaaaaaaatttcgccaggggcttgataatccgaaaaattgtggtatagtatgatgcgttagcactccgaggaattgagtgctaacgcatcgcttttttgtattcaatattaggaggcatatagattatgaaactcaaaccgttggcagaccgtgtgatcctcaagcagttcaaggcagaggaaaagaccaagagcggcctgatcctggcagcatccgcgcaggagaagcccgagatgttcgaggtcgtcgaagtcggcccgggcggcatggtggacggcaacgaagtgaagatgaccgtggccgcgggcgaccgcgtgatcgtcggcaagtactccggcaccaccgtgaaagtggacggcgaggaatattccatcgtgcgtcagggcgacattctggctgtcgtcgagtaatccaaccgctttgattttaggaggctatcattatggcaaaacagatcatttatggtgaagaagcacgcaaggcgctgcagcgcggcgtggatcagcttgcagataccgtcaagattaccctcggccccaagggccgcaacgtggtgctgggcaagaagttcggcgctccgctgatcacgaacgacggcgtgacgatcgcaaaagagatcgagctcgaggacccgtttgagaacatgggcgcgcagctcatccgcgaagtgagcacgaagaccaacgacgtcgcgggcgacggcaccacctccgccaccgttctggcgcaggcgatgatccgcgagggtctgaagaacctggccgccggtgcgaacccgatggttatgcgccgcggcatccagaaggcggccgacgcggctgtcgacgccatccgcacgaactcccagcccgtgagcggcacgagcgacatcgcgcgtgtcggcgcgatctcttccagtgacgaacacatcggccagctcatcgccgaggcgatggagaaggtcagccagaacggcgtcatcaccgtcgaggagagcaagaccgccgagacctattccgaggtcgtcgagggcatgcagttcgacaagggctatgtcaccccgtatatggtcacggataacgacaagatggaagccgtcattgacgacgcgctcatcctcatcacggacaagaagatctcgaacattcaggagatcctgccggtgctcgaggccgtgctgaacgcgggcaagaagctcgtcatcatcgccgacgacatcgagggcgaggcgctggccaccatcatcctcaacaagctgcgcggcacgttcacctgcgtgtgcgtcaaagcccccggcttcggcgaccgccgcaaggaaatgctgcaggatatcgccatcctgaccggcggccaggtcatctcgaccgacctcggcatggagctcaaggacaccacgctggctcagctgggccgcgcgcgtcaggtcaaggtcacgaaggagaccacgaccatcgtcgagggtgccggggccaaggacgacattcagggccgcatcgcacagatccgcgcccagatcgagacgacgacctccgagtacgacaaggagaagctgcaggagcgcctggcaaagctgtccggcggtgttgcggtcatcaaggtcggcgctgcaaccgagaccgagatgaaggaaaagaagctgcgcatcgaggacgcgctcaacgcgacccgcgcagccgtcgaagagggcatcgtggccggcggcggcacggcgtatgtcgtggccagcaaggccgcacaggcgaccgctgccaagctctccggcgatgagaagaccggtgcgaacatcatcgcagccgctctgcgcgccccgatctgccagatcgcggccaacgccggtgttgagggtgcggtcatcctcgacaaggtcagcaagagcaagagcgtcaactacggctacgacgccgcgcacgacaccttcggcgacatgatcgaaaacggcatcgtcgacccgaccaaggtctgccgcagcgcgctcgagaacgccgcgtccgtctcctccatggttctgaccaccgagtccctcgtggccgacctgcccgagaaggccgctccggccgctccggctgccccggacatgggcggtatgtactgattcccccctgcccctgcaaaacaacagacaaagcaagatccggcgcccgcgatgcgggcgccggattttttgctgtctgctttcttctctatccacggtgcagcaggctcgcccgctcacgcgccgggcctgcgccggaaatgcccgccgcgttcattgcggatcacatcgtccagccgcttgatcatgtccttcggcatatactccgtcagcgccgcccagatggactcccgatactgaaaaatgatccggtcacggccgatccgcagcagctccatgccgtttttcggcacatactccacctcgttccgtgagaaatgcaaaaatgatgcagacatgtacgaaaatgaattcacgccaaagccatatgtacgaatttcatcccaccgaagcgtaaagcgcccccaacgcgggctccggcaatggatgccttcggcatcaaagctgcagcgcgttaaaaatcgactgaatgcctgcggcttattcgccaagatgaaaaatgctgcccctggaacatctaatataagcataagtgcgattttttctgaaacaacattgcattccctatatatccaaatgttcagcgccgttaatgacccgaatatcagcatgactatgccaaatatatagtaagtcgcagtattgtcatagagtttatgccacttttgcttcatcgcatctccccgcccgtccgtttcggtctctgcgcccattctacacacccgcgcgcgggctgtcaaaccgggcaaaaaaacaaagcctgacgcaaagcgtcaggcctcgtaaggttggctcagccccgggcgggctgacagcgtgctaccggttaacagcacacaaaaaatgaattacttgttcgggcacatggatctgaacttctcggccatttcgtggtcccagccccactgatcatgcagccatccgaggaagcaaaacgggcaatcccaaatcatgaattttactctcctttcgtgtttttgaacaatttttatcagttccagaaaaatattaccataaatcgaccgtttttgtcaagtatttctttcctttttgtaacagattcgttttttatggattttttgatgcatctgttgggaaaccggcacttgcgcccaccgccgccaaaaggcagcaaatgcacgaacgcccgccggatatccggcgggcgttggggattcgggatctggtttacttcgcgtagtcgatggccttggtctcgcgcaggagattgaccttgatctggccggggtaggtcagctcgtcctcgatcttcttggcgatgtcgcgcgcgagcagcaccatctgatcctccgagacctcctcgggcttgaccatgatgcggatctcgcggccggcctgaatggcaaagcagttggcgatgccggggaagctcttggtgacttcctcgagcttttcgagacgcttgacatagttctcgatgttctcgcgccgggcgccggggcgcgcagcggagatggcgtcggccgcctgaacgaggcaggcgacgacggtgtgggcctccacgtcgccgtggtgggcctcgatggcgtggatgacttcctccgactccttgtacttgcgggcgatgttgacgccgatggtcacgtggctgccctcgacctcgtggtcgatggccttgccgatatcgtgcaggaggccggcgcgcttggcggtggccacgtcgacgccaagctcggcagcgagcaggccggcaatgtgcgaaacctcgatggagtggttgagcacattctggccgtaactggtgcggtacttcatgcggccgagcagcttgataagctcgggatgcaggccgtggatgttcgtctcgaaaacggcgcgctcgccctcggccttgatggtggcgttgacctccttctgggccttggcgaccatttcctcgatgcgggcggggtgaatgcggccgtcctgaatgagcttttcgagcgcgatgcgcgcgacttcgcgccgcacggggtcgaagctcgagagcgtgatggcctcgggcgtgtcgtcgatgatgaggtcgcagccggtgagcgtctcgatggcgcggatgttgcggccctcgcggccgatgatgcggcccttcatctcgtcgttcggcagcggcacgaccgacacggtcacttcgctggcatggtcggcggcgcagcgctggatggcggtggcgatgatctcgcgggcgcgggtatcggcctcatccttgtactgggcctcgacctccttgaccatgagcgcctgctcatgcacgacgtcgtccttcaggctgttgatgaggaaggccttggcctcctcgaccgtatagccggagatcttctcgagcagctccatctgggtctttttgagctgattgatctcattctgcttggtgtcgatcgcggcgatcttctggttgagggcgtccgtctttttgtcgagcgtgtccgttttgcggtcgagggtctcctccttctgctggaggcggcgctcctgcttctgcagctccgcgcggcgttccttgacctcgcgttcgtactccgtccggctcttgtggatctcttccttggcctcgagcagggtctcgcgccgcttgctctcggcactcttataggcatcatttatgatctgcttggccttctcttccgcactgccaatctcgcgctccgagacctttttgcggtaaagtccgccaaggatacaaccaaccacaagcgctgcgatgatacaaccgagtgctattggtaacgacatatgaaattgtgatcctccgtttcttcagattttttctacgatattttttcaagttggaaaaggcgggccatcaagcgcacccgccgggaacataacgatattcgtgtcggcgctccatccgccgccaaaaatataatcacattattctaactttattccggacagttgtcaagtgctgccgcccctccggcggattcttttctggacagggccgccgcgctgtactataatatagaccatccggcattccggcgaagggaggggcagcgtatggcagcgctccggtacattctgctcgcagccgccatcacgctcacgctcgcgctgctggcgcatctggttttgcccgcacgcggccctatcccccggcgcacgggccgccgcggcgggcttggcatcgcggcgctgacggcggtgtacgccgtcgcagcgttctttagcctcggctctgcgcgcgacccgcagcagttctgctcgttcgaggcgggggaatccgccgtgctcgcgctcgagcgcgagagtgaaattttcgccgtgtggtactaccccggtttgtcgaccggcgaatacaccctcgcctattcgaccgacggcgtgaccttcacgcccgccggcacgatgccgcagggctacgccgacctcttcaagtggcttcagccggaaatggccgacactgcgcccgcagcggcggcctatgtgcgcatcacggcgagcgcgcacgtggagctcggcgagctcgcactctacgacccgcagggcagccgcatcggcgtgcgcgccatcaccggccctgcgagcgcggacgcgctctgcgacgaagcggacaccgtgcccgccgcgtccacgtactacaacagtacgtattttgatgagatctaccacgcgcgcacggcctatgagcacctgcgcggcgtgtatccgtatgaagtctcgcacccgccgctcggcaaggagatcctctcgctcggcatcgtgctcttcggcatgacgccgttcggctggcgcttcatgggcacgctcttcggcgtggccatgctgccgctgatgtgggatctgctgcgccggatgttccgcgacgaccgcgtggccctgtgcggcgcggcgctgctggcgttcgacttcatgcacctgacgcagacgcgcattgcaacgatcgacagctttgcgacgtttttcatcctgctcatgtacctgtttttgtaccggtacttcacggaggggcggctgcgccacctcgccgcctgcggcgtcacgttcggcatcggcgcggccacgaagtggacgtgtctctatgccggggcgggcctcggcgtgctctgggcgctgcactggatctttgccggcgtgcaggcgcaccgggccggtgacggccgccggtatctccgccgcctgctgggcaacatcggcttctgccttgtgtttttcgtgctcgtgccgggcatgatctattatgcgagctattacccctacggcgcggcgcgcggcctgcacggcgcgggcatgtacttcacgcgcgaatacgccgccatcgtgctggaaaaccagcgcttcatgtttacctatcattccggccttgtcgccacgcatccgtattcctcgcgctggtggcagtggctgctcgacctgcggccgatcctctactacctgtcgtatggcgacgggacggtgtcgaccatcggcgcgttcgtcaatcccctgctgtgctggggcggactgctggcgctgccggtgctcgcataccgcgcggcgaagcgcgaccgcacggcgctgtttctcctcgtcggctatctggcgcaggtgctgccgtgggtgttcatctcacgcctgacgttcgaataccactacttcgcggcgacgctctttctcgtgctcgcactcgggtacgtgttcgaccggctgcggcagcgcggctatctcggcatcgtgtatgccttcacggcagcaaacggcgtgctcttcgcgctgttttaccccgtgctcacgggcgtgacgatcccgcgcgactatgcatggaatgtgctcaaatggctcccggactggccgttttaacgccggggaaattacagaaatcgaggtattgtttatgattgcgatcggatgtgaccacggcggttttgccctcaagcaggaggtcatgcgccatctcgacgagctgggccttgcctacaaggacttcggcacgtacagcgaagagagctgcgactaccccatctacggcgaggccgtggcccgcgccgtcgcgggcggggagtgcgagcgcggcatcctcatctgcggcaccggcatcggcatctccatctccgccaacaaggtcaagggcatccgcgccgccctgtgcggcgactgctactccgccgagatgacccgccgccacaacgatgcgaacatcctcgccatgggcgcgcgcgtgctcggcccgggcctcgcgctcaagatcgtggacacgttcctcaacaccgagtttgagggcggccgccacgcgcgccgcatcgccctcatcagcgacattgaaaaccgcggctgacgccgcctgacccaaaggaggtgtgccgatgcgcgcccatcgcaacgacgtttaccgcgcccggcgcagccggggcaaggcctggccggtgatcttgtggatcctcgccgggctgatcgtgctggcggtgattttgttcttcgccggccagaaatacattgtctatgacagcgacggctctctgcacgtcgtcttccccatcatggagacggccgcccccgtcaccgagagcggccagcccgagacggtcgacaccgagctcgtgctcgaggacccggactattccggcatcgtctccgacgcgggcaagggcctcaccgagctgcacgggcagtatctgacggccgacaaaatcacgcccgacgggctcacgcgcgcggcctccgccgtgaaggcggcgggcggcaacgccctcgtgctgcagatgaaagcccccggcggcacgctgagctggaagtccggcgtctcggatgccgcggcctacggcgtcaacggcacggccgagcttgccgacgcgatccagaccgtcaaggggcagaacatctacctcgtcgccgtcgtgagcacgtgcgtcgacacgctcatggccgaacgctacgccgccaccgcgctgcagaccgcgtccggcagcgagtacaccgacagctccggcggctgggtcgacccgtacaacacgttcatccgcacctacctcgtcagcctctgcaaggagctgcacgacctgggctttgacgaggtcacgttctcgtacctgcagcagccgctgtccgacacggaggtcaaatatgcgtcccagagcggcacgccctcgcgcacggacgcggtcgtgtcgctggcaaagtacctgcgcgcgaacctggccgccacgggcctgcgcgtgagcgccgtcgtgagcgcggactccatcctgcaaagcagggccgcgcagtccgggcaggacatggcggtgttcccgaagctgtttgaccgcgtgtgcgtgttcgcctcggccgataacgtcgccacgctccagagcgccatcgcggccgacagcagctttgacgccgcgacgcgcttcgtgccgtttcttgccaaggcgccggaatccggcagctatgtcaccaccgggtgagccccggcccatcaaagaaacccccgcccggcgtgaccgaatggtcacgccgggcgggggtttgtgtacgcacgatcaaagcgccgcttcgcgccggacaagaaagcgcgatcttctcagtcagccgtttcttgggtgacgacgggtttcccctctgcatccagcagcggcgtcaatccgcccgcatatccgctgacgataaagagataattcacgccggtctctttgtccacatagatcgtttttgcgctcataaagccgccttcctgatatacgatctcaaaccgcttttctttttgcattttgtctggcctctgcattttgatttgcgtcctgcgttcctcttgccatgcagccgcgcgctatctgtcccagcaggtctgtttgtccgcctccgtgatcggccgaatgaccctgcacggattgccgacagcgaccgaatcgctcggaatgtctttgacgacgacgctgccgcccccgatcacgacattgctcccgatcgtgacgccgggcatgacctgcacaccgccgccgatccacacatgatcgcccacggtgattgggtaagcatactccagcccccgctcgcggcactcggcgtcgatcgggtggccggccgtgtaaaacccgcagttcggcgccacgaacacgtgctcgccgaacgtcaccgcggcgcagtcgagaatgacgagattgtggttggcgtaaaagtgctccccgagccggatgttgtagccgtaatcgcaccagaacggggccgtcacgcaaaacgtctcgcccgttttccccagaagctgctggaggagctcccgcatcccggccgcgtctgagggccgcagctgattgtaggcatggcacagctccttggcccgcacgcggtcggcgcagagcgcgctgtcgtcggcgtcatatagcatcccgcgcagcattttctccttctcagtcatggtcattcctcccgtaaattccgcctcccggcgcgctgtgtctcatcttaccacacatccgcgcgcagcacaaccgcagccgcagcggtcagttccgctgcggctgcggtctgctttcttccccgcgtatcttactccttcggctgcttgacggcgaaaatgtgcatcgccatgccgagacccgtcacgccgcagaacacgcggtgcatgacgcgcgcctgcttcgggccgattttcttggccgcggcgtgcgtgtagttcaggccgaggatgcctgagccgatgaccgacccgctgacgacggcgggcacgtccgtcttgcccgttgcaaacgcctgcaccgtgtgtacgcccgcgccgaggcacagcagccccgcgcccgcgccgtggatgagcatgcgcagcttgtagtgtgctttgccccacttcgtgtgcttgagcacggcctccgcgccgtcgatggcgtagcccgccacgccgatccacggccagattttctggtacttgccgagggtgttcatgatcttgcaatcacattttttcatggtcgagtgcctcctgagcattcatttttggttctagcccggcgcgcagccgggacagggcttcggggtcattttccacctcgcgcgtgacgagcacgacgagctgcgcgtccgtgcagccgctcaccgccgccagacagtcgagcagccgcagcgtcgccgcggcataccgcacgggaaaggccacgtcacggtcgtcgagcgcgtccatgccgtgccgccagacaatcgtctgcgcgaggcatgtctgctgcatgggcgtcattctgggcggcgggcaggcagggagcgccgccgcgcgccgcagcagctccggccagcgggcatcgagcggctccggggacgcgaacgccgccgccagcgccgccggcggcatgggctccggcgctgcatcgaccgtcacccccggcacatccccggcggccagcgccgcgatgcggtgccggcagagcaggcgctgcgctgcgcacgcgaaagcgcgcgcggccgcgagattttcatacgccgtgtgccccggccgcgccagcagcgcaagcacccggtcgcgtaccgccgtgacggcggccgtcagccgccgctcacgcgcgccgggcacatacccgtcgtccggcagcggcgcggagacaaagcgcaggggcgcggagcgctccagcagccgccgcgcggcctccgggcacgcgggtgatagcccctgctccacccggtcgcacagcagcacctcccagcgcggaaaatcccggcacgtacggcacaggctctgctcgccgagcgtgcgctgcagctcacacaggccgtcggcacacagaaacgggcagcgcccgtccgtctgcgcaaagtacgtatcgccctcgctgtctacgcgcagcacgcgccgcagctttgccaccagcggatgctgcaggcgcaggtaagcgtcctgcgcgtccggatcgacaacgatctcccacgcggcgcagcacgtctgcggacatgccccggccaggcaccggaacgcagcgtaatcatcgggtcgggtctggtacatggcggcctccttgcgcgtattttttctattgtaacacatcgcgcgccgcaggaaaagggacgttcggcactcccgtgcgcaaaaaaacagacggacaccgaaatgtccgtctgtctgttggttttttgaccggccggcagcttactgcttgaccagatccataaggttaatgatgccgcgcgggcagatatcggcgcagtggccgcagccgacgcacttgtcatagtcgatcgtggacacgaagttctcgatcttgatggcttctgccgggcactcgcgctggcacttcatgcagccgatgcagccgacgtcgcagatcttgcgcgtgacggcgcccttgtcctgattgcggcagccgacgagcacagcctgcttatacggcaccttctcgatgattttcttcgggcaggcatcagcgcaggccatgcagccgacgcacttgtcgcggtcgaccttggcaacaccgttgacgatgtgcatcgcaccgaacttgcaggctctggcgcagttgccgaggccgatgcaggcgaagcggcactccttgttgctcttgccgccgaacagcatggcagcctggcaatcctggggccctttgtagttgaagcgcttgacggcgacgccctccgcgccggagcacggcacgaacgcgaccatcttctcctccgcaccggcggagacgcccatgatcgcagcgatcttgtcggcagcttcctggccgccggcgacgcagcagttgaccggagcctgacccgccgcgaccgcagcggcataaccgtcgcagccggggtagccgcagccgccgcagttggcgccggcgaggcactcacgcacggcctcctgcttggggtcaacttccacatggaagattttagcggcgaacgccagcagcgcgccgaaaacagcgcccatgatgccgaggacggcgatcccttcgagaatcaaagtaaaatccatatttcagccctccttagccgatcttcatgccggagaagcccatgaaagccagggccagcagaccggcggagacgaggcagatcgggaagccctcaaagctctccggatagtcggcaaactcgagcttctcgcgcacgcttgcgaacaggcagatggcgagcatgaagccgaggccgccgaacacaccgtagaccacgctctgcacaaagccgaagctgtactgcgtgttgagcagcacgacgccgagcacggcgcagttggtggtgatcaggggcaggtagatgccgagcgcggagtacagggacgggatagactttttgaggaacatctcgatgaactgcacgagcgcggcgatgacgaggatgtaagcgatcgtctgcaggaagcccaagccgagcttgacgagcaggcagttgacgagccagcagatggcggacgccaggcccataacgaacgtgacggcgaggcccatgccggcggcggtgtcgatcttgctcgagcagccgaggaacgggcagcagccgaggaactgcgagaagatgaagttattcgtcagcacggcgctgaggatgatggcaaaaatactggtcgtagaactcatgttatgccgcctccttttcctgcgctgcgagcgctttttccttggcttccttcttctcggcagacttgcgcagcgcgtactgcatgagcgcaatcaggcagccgagggtgatgaagccgccgatcgggagcgtgagcacgagcgcgccgtactcggacgggaagatctgaatgccgttgccggtgccgatgacaccgtcgatggtgttgatgatgccggtgccgaacgagcccttgccgagcagctcacggatgacgcacatggcgatgagcacgagcgtgtagccgaggccctggaagatgccgtcgaagaacgacgggccgacggggtttttctggcagaacgcctcggcgcggccgatgatgatgcagttaacaacgatcagcgggatgaacacgcccagggacgcgctcagcgcgggaacgtaggcctgcagcagcaggtcaacgatggtgacgaagcccgcgatgaccagcacgaagatggccagacggatatcgttcggaatgactttgcggatgagggaaatgaccacattgcagcaggtcagaatgacgagcacggacaggcccatgccgatgccgttgaagaggctagtcgtgatggccatggtggcgcacatgccgatgagctgcacgaggaccgggttattggtaatgaggccttccttgaactgttgtttgatattcatgtttcagccctccttaacccagcgacttggccgcgttgatgacggtctgcacttcggtaacgacagcgcgggacgtgatcgtcgcgccggagatggcggtgatgtcgccgccgtctttggcaagcttcataccgtcgccctggccgacgaggttgtcgcgccaggcaccttcgttcgtgtccgccgccttggcgccgaggccggaggtctcggagtgcttggtgacgtacacgccggtgcagttataatcatcgtccaggccgacgaccatggtgatcatgccctgcgcgccggagaacgtggtctcggcgacgtagccggcctgctggccgccggtggtggcggtgctgagcttggtgatggtgccatcgttctcaaaatcggcctgctcggtgtattcgtcggccgcgaggacgttggcatatgctttcttggtcgtctcggccgcgcgcatggcgatggtgtccttcgtcagctcattgacgagaccgagggccagcgccatgatggcggacacggcaaagagcacgagcgcgagcttgatgatctggccgccgccggatttcttttcagtcttttcagccatttgcagcagcctcctttgcttctttcttcgcagcctttgcagcggccttcttggccttgacgtcctcacggctgacgccgaactgacggcgctgggtgtgcttgtcgaacatccatgcgcagcagttcatgatgaggatggcaaaagaaacgccctccgggaagccgccgaacacgcggatgagcacggtcagcgcgccgcagccgacgccgtagatgatgcggccgggagcggtgacggggctggtgctgtagtcggtcgccatgaagaacgcgccgagcagcaggccgccggacaggaggttgtcgagcatccactcgacgtgggtgtagccgccgccgtttttgcttccgaagatgagcgtcagcagcgcgacggtgccgatgaacgacacggggatgtgccaggtgatgaccttgcggcacagcaggtacacgccgccgatgagcagcgcgagcgcgctgacttcgccgaggcagccgggcatggtgccgaggaacatggacttataagtgaagtactgcggcagcgcctcgccggccttcatgtagctgagcggggtggccatggtggtcgcgtccgcgccgatgacggacgtcaggctgccgggcacgacccaggtggtcatgaacagcgcgtaggaggcgagcaggaacgcacggccggcgagcgccgggttgaggaagttcttgccgatgccgccgtagagctgcttgacgaccacgatggcgaagaacgcgccgatgatcggcagccaccacttgcagttggccggcagggtgtacgcgagcaggatgcccgtgaccacggcggacaggtcgccgatggagtcgggctttttcatgagcttgcggtaagcccactcaaagaacacgcacgacacgatggacacggccagcgggatgagcgcctgcgcgccgaactgccacacgccgacgcacagcgccgggagcagggcgatgatcacgtcgagcatgatctcgcgcgtgccgcgcttggcgcgaacctgaggctgataggcagcgtcaaaggtatattctttcggtgtcatttcgtttcagcctcctttgcagcggcttccgcgcgggccttttcttcggccgcgcgggcggcgaagaggagcttcgcggtcttgaaggtatgggtcaggggcagacggcccgggcaattgtacgagcagctgccgcactcgaagcagtcgagaatgtgatacttctgcatattctcgaagtcgcgcttctgatagtacttatacatgtacagcggctcgagcttcatcgggcagacggtcaggcacttgccgcagtggatgcacgtcggattctcgacggagcggtcttccttgtcggtgaagaacaggatgcccgcggtgcccttgatgttgggcgcctcgagattcgtggcgatcaggcccatcatggggccgccgaggacgatcttcttcggctcgacgacgaagccgccgcactgctcgacgatgtagctgaacggcgtgccgaagcggcactgcaggttgtaggacttatcgcccatggcgctgccggcaacggtaaggacacgctcgatgctgggcatgccttcgtagcaggcgcggtagatggcgtaagccgtctgggtactgatgacgttgcagccgacgccggacggcaggccgccgggcttgacctcacggttcgtgatggccttgatctgcatcttctcagcgccctgcgggtacttgacgttctccggcacgatctccacgccgtactgcgcggggtttttggacaggagcaggtcgatggcgtcctgcttgttcttctcgatgccatagtaagccttgtcgaggccggacgcgatgcgcgccagctcgatgcccttgagcagctcctcggggtggttcttcatggtcaggtggtcgccgttgaggtacggctcgcactctgcgccgttgatgatgagggtatcgactttgccaaggccgccgcggatcttgaacgcggtcgggaacatggcaccgccgtgaccgacgataccggcctcgcggatgcggtcaaggatggcttcgggatccttcatctgctcgggcgtcaggggcgcgagatccgtgcagggggtgtcctggaagtcattttcgatcacgatcgcggggatcatatcgcccagggggtggggtctcggctcgatggcgatcaccttaccggagaccgtcgcgtggatgggagcggagacgggtgccggattgtcagcgatcttctgacccatcttcacataatcgcccaccgcgaccagcggtttgcagggtgcgccgatatgctgcatcatcgggagcacgacctgcggcggaggagcaatgacggtcaccgggacatccggcgccttcatgtagttgggatgaactccgccatgaaacttaaagggcatttgcatcacctctctattttttgacccacatatattagcacgccaacctaatttcgtccaccaaaaatggcggaaaaacatcaaattgtactaatttaaatattaacgaacctgcaaaaaagctgacaaatccaacatttccggaaactttgcaacattttgtgcatattggctggatttttcgccgccgcggtccgcggcgcggaaaaaaatccgcgtctggggcttaacaagcgcggaaaaatcctgtaaaatagatagcaaatgcgctgccggcgcgccgccggcagaaaggaggccacgttatgctgacaccctgggcggatacgctcgaccgcgcgcagcccctgccggagtatccccggccgcagatggtgcgcgacagctacctgaatctcaacggcccgtggagctacgcgatcacgacgagcgcaaacaagcccgcgcaggccgacggcacgatccttgtgcccttctcgcccgagagcgagctgtccggcgtggggcacgtcctgcagccggaggaatacctgtggtacatccgcacggtcacgctgccggacggattcaacgtcggccgcgtgctgctgcacttcggcgcggtcgaccagaccgcgaccgtgtggtgcaacggcgtggagctggccacgcacacgggcggctacctgccgttcacggtggacatcaccgaggtgctggccaaggaaaacacgatccttgtgtgcgtgcgcgacgcgacgaacaagtcccagctcccgcgcggcaagcagacgctgcacccgcacggcatctggtacacgccgcagagcggcatctggcagacggtctggctcgagagcgtgccgcagaactacatccgctccctgcacgtgacgccgctgtttgacgcgcatcaggtggagatcaccgtcgcgggcgaaggtcagtgcacgatcgacctcgagggcaagcgcttcacgttccccgcgggcgtgccggcgcacgtgccggtgcagtcgtttcgcccctggtcgccggagcacccgacgctctaccccttcagtgtgacgctcggggacgacacggtctacagctactttgccatgcgcaagtgcagcgtcgagacggacaaggacggcgtgcgccgcctgtttctcaacggcaaaccgtattttcacaacggcctgctcgaccagggctactggccggacggactctacaccgcgccgagcgacgacgcgctcgtctacgacatccagctggccaaggacatgggcttcaacatgctgcgcaagcacatcaaggtcgagtgcgaccgctggtactatcactgcgaccggctgggcatgctcgtctggcaggacatgccctgcggcggcaggcgctacgacccgctcatcgtctccaccccgctcgtgacgggctggcatctcgacgacagctggtatcccctcttcggccgcacgaacgtgacggcgcgcaaggcgtttttgaacgagctgcgcgacatggtcaccacgctctacagccacccgtgcatcgccgtgtgggtgccgttcaacgagggctggggtcagtttgacagccagacggccgtgcaggtcatccggtccgtggacaagacgcgcacgatcgacccggccagcggctggcacgatcagggcttcggcgatgtgcgcagcctgcacgtgtatttccagaagtacaggttccagcccgataagctcggccgcgccacgctgctgtcggagttcggcggctatgtccaccgcgtcgagggccacgccatcggcggcaagagcgtcggctacaagacgtgcgacgccccgctctcgctcgagtacgcgctccaggcgctctatgacgagcagatccgccccgccatcgcgcagggcctcagcgccgcggtgtacacgcagctgagcgacgtggagcacgagctcaacggtctcgtgacctatgaccgcagcatcgtgaagctcccggtgcagacactgcacaagatcttctatatcgaaaacgagtgaaaaaaggccgcccgctgcgatcgcagcgggcggttggtttttctgttttgggagcgctcagtacgccacgccccagtagatcatgcacttggcgggcttgccgcacacggggcacacatcgtcgaggtgctcctgctcaaacgggatgcagcggctggacatgccggccttgtccttcatctcgagctcgcaggcgaggtcgccgcaccacatggtcttgatgaagccgccgtttttctcctgcagttccttggcctcggccagcgagtgcgcagcataggtgtgctcgtcgaggttgcgcttggccttgtcgaacaggccctgctgcacggtctcgagcagctcagggatgcgcgcctccagctcatcgagcgcgacggtgatcttctcgccgttgtcgcggcggacggcgacgcagtggccggcctcgatgtccttcgggccgatctcgacgcgcagcggcacgcccttcatctcccagttggcgaacttccagccggggctgttgtcgctgaagtcgccctgcgcgcgcaggccggcggccttcaggcgcgcgatgagctcctcggccttctcggtcacgccgggcttgtgcgccgcgatgggcagcacgatgacctggatcggcgcaatgtgcggcggcaggacgagaccgttgttgtcgccgtgggtcatgatgaggccgccgataacgcgcgtggacatgccccacgaggtctggtgcggataggcctgctggttgttcttgtcggtgtaggtgatatcgaacgcgcgggcaaacccgtcgccgaagtagtggctcgtgccggactggagcgccttgtggtcgtgcatcatgcactcgatggtgtaggtgttttcggcgccggcgaacttctccttgtcggtcttgttgccgcggatgacaggcatggccagctcctgctcgcaggtctcggcataaatttcgagcatctgcagcgtctccttgcgggcctcggcctcagtggcgtgcagggtgtggccctcctgccagaggaactcacgcccgcgcaggaacgggcgggtggtcttttcccagcgcatgacgctgcaccactggttatacaggcacggcagatcgcgccagctatgcacgatgtggctccagtgctggcagaagagcgtctcggacgtcgggcgcacacacaggcgctccggcaactcttcgctgccgcccatcgtgacccacgcgcactcgggcgcgaagccctcgacgtgatccttctccttctgcagcaggctctcggggatcagcatcggcatggccacgttctggtggccggtcgccttgaacttgccgtcgagtatcttctggatgttctcccagatggcgtagccatacgggcgcatgatgaacaggcccttgacatcggaatagtccacgagctccgccttgatgcacacgtcggtgaaccactgggcgaagtcgacttccatatcggtgatctgctcgaccttcttttctttggccataagcgcaacactcctctgtatgccgcgcagagatcccgcgcgggcgtattcataatgtatggggtaacttatatagtgtatagaatccgccgccgcttgtcaagcgccaagcagctcctgcaccgcgaaaattccgatcatgacggcgatgagaaagtacatcacgaccgcggcgacggagtgccgcgccggccggcggtcaaacagctggcccacgcaccagaacacgagcaggccggtgccgatccagtagaccgggttgagcgcgacggccatgaccgtcacctccacgatcagcagtgcgaacaccgcgatctgccacgtgcggatgcgccgcgcgcggctgttgcagtagatctcgcgccaggcgtctgaaagctcgcggcgctggcggcggaaaaacgactcgcgcggctgtttcggcgcgggctcgcccgtttcggccggcgtttcggccgtctcgggcacagtttcgacggtttcggccgcggtttcgggttccgtttcggtgtaggggcgctcttgttccatgcgttccactcctttccggtttttcggaaaaccggtcctttttcctcaggataccccgccgcaggccgcctgtcaagcacccgaatccggtcgaaaagtgcatttcgggcttgaccgcacaccattcgtgcaatataatatgtaaattagtgatgctatttcaagatgcaatcgaaccccctggaggtgaccatctattaacagacagagttacatggcggagatcagcagcctgctcggcctgatcaccgacgacaatacccgtcaggcgctcatcgcgcagatggagaacatgtttgataacgcccccgatgaggagcgcctcattcaagagatcggcaacccgacgaaagtggccgttgccctcatccggtatgccgacagcggcaaggtcacgccggccgccgcgcccgtcgttgcgcccgagcaggcgccgaagcgcacgccgcagccgcgcccgcgtgccgagcagtaccgcccgatgaccgcggccgcggcgcaaaagcccgcgccgtcgttcacgttcccggagccgctggagaaccccgacgagcccgaaacggacgaagcgcccgtgctcgacggtcagttctcgtttgacgagcagcccgaggaaggctactatgacgaacagcccacggacgacggctactacgacgagcagcctgccggtgacgacggctactacgacgagcaacccgccggcgacgacggctactacgacgagcagcctgccggcgacgacggctactacgacgagcagcctgccggcgacgacgactatgacgacccgaactacgccaccgacggcgaggaagggtattatgacgaggcctattacgaggacgagccggcctacaagacgaacgtctttctggccgttctctacacgctcggcgcgatcgtgatcggcgtgccggtgctggccgtgctgctggtgctggatctggccgtgctggccatcggcgtcgcgtgcggcgccggcggcgtgggcctgatcgcaacggccttcatcggcctgcccatggtggcggatatgctcatcctgctcggcggcggcgccgccgtgatcgccatcgcgctggtcgtgatctggctggccatctggctgttcatccgcatggtcatcggctgggtccggctgcttgtgcgcctgggtaagcgctggtgcagaaaggagatcgccgcatgaaaaaagcctggaaaaccattctcatcatcgcgctgtgcgtcctgatcgtcggcgagatcgtgcttggcgtcggtcttgcgaccggcggcagccccgaccgcatctgggaagcggcgtatgagcactacgacatcggtgcgatcttcgccctcatcaagtcctccggcatcgcggacctgctggcgagcatcggcctgtaagaaaagcaaaacatgaggcggcgagcgtggctcgccgcctcatttcattttatttcattttaaagagcagcacgccgcccgtcatcagcgcgagccccgcccacttgctccagccgaaggcgagcttttccgtgcccatgatgccgaaggcgtcgatggccgcggccgcagaaagctgcgcgatgaggatcgtcgccacggcgagcgtcgggccgagcctgcccatgccgagcatgaccgtgaccgtgatggccagcgccagcacaccgccgaaccagcagtatttcggcgcggcgcccagcgcggcaaagctgcccgtgcgccagagcaccagcaccagcagcgacagcaccgccgccacgcactgcacgaaggcattggtctccatcgtaccgatgtgttcgctcaggcgcgtgttcatcacgccctgaatgctcatcgccgccccggcgaggatgcacgcgagaaatccacccaaaattcatcggctccttccgaataatccttgcactgccgcgcgaaatgtgttacactgtgtcgtactgaaaaacatttgcccgcagcacgcgaacaaaggaggggctgtttatggccgcaggcagcaaaccgaaatactatctcgtggaggcgagcgtcctgcccgagatctttgccaaggtgatcgaggccaaggagctgctcgagaccggccaagtgcgcacggtggcggacgccgtggcgcgcgtggacatcagccgcagcgcgttttataaatacaaggacttcgtgtccccgtttcaggacatgtcgcgcggccatctcgtgacgttcaacctcgagctgctcgaccggcagggcgtgctgtcgtccgtccttgctatttttgccgaaaacggcgcaaatatactcaccatcaaccagagcattccgacgagcggcgtcgccccggtgacgatcacggccgcgaccgagaacatgcagacgacgatggaggcgttcatggcggcgctcaaagcggccgagggcatcatccgcgtgcacctcatggccggctgaagaaaaaagcaaacgaaaaagcatccccggatcgacacgatccggggatgtccgtccgttaaaaagtccgtgccgaactttttaacagacggacagcaaaatcggattcgaggcgggccttgccccctcgagctcccccgctgctctgtccgctttgcacttgcgcgcaggttccaacagttttacagccccgggccaattacggtccgaggctgttttcgcttcatatcgatttatcttttcactcgagcagctgcgcgcggccgccgtgcaggcggatcttcccggcgcagaagcgcttgaccgcctcaggcagcagcttccactccgcgtcagtgagcacgcggcgcttgagcgtcgtgagatcgtcgtcctcaagcacgggcacggccttttgcagcagcaccgggccaacgcctccgttctcgtccacgaggtacgccgtcgcccccgtgaccttcaggccgcgggcgagcaccgcctcatgcaccgcgtcgccgcgcagcgtctcaaacgccgggatgagcgacggctgcaccgcgatgaccttgttgtggaagctcctggccgtctcgcggccgacgccgggataaaaccccgcgttgatgacgagctcgatgtccatgtccttgagcttgttgcggatggccatgtcgtacgacgtgtcgttcgggaacatggccggctcgacgacgacggtctcgatgccggcgttgcgcgcgcgcttgagcgcgtaggcattggcgtcggacgagatgacggcgacgagctgcagctccgggatctcgccgaaaaacacggagtccagcagactttgcaattttgttcccttgccggaaaccagaacagcactgcggatcattttgctcgtttactccttcccaagcagccgtgcggccgtggcgcggttattgtcctcctgacggttgagcagctcggtgcggcggcgcagctcctcgcctctgccggcgagcgcgacggccgaatcgatcaggtcggacaggtccttctcgttgagcgcctcgaactgcatatagttattctgctcgacatagtcgagaaacgccgtgaccttcgggtcataggcaacgccgatgagcggcacgccctgtccggcggcaaaaatcagtccgtgcagccgcatggacacgaccgtcgtcatgcgcgagagcacgccgatgacctcgccggtggacatctgctcgtcgatcatataatacgggatgctcaaatgctccgtgacgagccggctggcctcgccgtcggtgcggaaattgatgctgaggaacaccggcgtcaggccgtatttcaggtaggcgtacacagcgccggcggcgaacacggtggccttttcctcaatgccgggccacttgcgcagcacgaagccgatatacttgccgtccgggtccatatcgtgctcgcgcagaatgcggtcgatgcggctgcgctctgcggccggcagcgtgagcgcggggtcggacgcgaggatgacctccgggtccgtgacgccgaaatcgctgagcgtctcgcggctgtccggctcgcggagggtgatcttgtcgacgcagtcgttgatgatgcgcgcggcgagctgccggtcgcgctcataaacgatcgggccgatgccgcagccgtacatctgcaccttgcagccgcagcggtgcgccatgcggatcgtgccgagataataccataagctcagccggctcgtgacgtcctgcatgaggctgccgccgccgctgataaacagcaggctgcggcgcaggatgcgccggatggcaaaaagatgaaaccggtggcaggcgttgacgccgcaggcgctgcgcgtgtccttcggccggcgggagagcacggtcacgggcatatgcgggtcgatgcggcgcatctcgccgatgatagcctgcaaaatggcgtcgtcgccggtgttgccgaagccgtaggcgccgcagatgagcacgccgtcgcgcacaccgtcgcgccggttgcgctccatgcggaagaccgcgtggtagatctccagctggcgcaggccggtggcctcctcggaaaagtcggccttgccgcgccggtagagcgcctcgcccatctcgcggcggtaattttcgtcgagcgcgtagcgcgcgagataggccgcgagcatgcgcacgtcgccgggttcgatgagcaggccggtcacgccgtgctcgatgatggccggcacgccgccgacgttcgaggcgacggtggccagatgcgcgcgcgcgccctctggcagcgcatagggaaacgcctccgacacggacgagagcgtgttgatatcgagcgcgccgtagaagctgtcgaggtcgttgacccagccgaggaagaacacgctgtcctcaaggttcagctcctttgtgagcgcctcgagctttttgcgctccttaccgtcgcccgcgatggcgaggcgcagctgcgggcaggcctttttggccagcgccactgcgcgcaggagcgtcgggatatccttcacggggtcgagccgggcggcaatgcccgcgatgacgtcgccctcatgcacggtatagccgaactgcgcgaaatacgccgcgcggtcggtcttgggcacgacgtgggaaaagtcgagcccgttgtagatggaaaagagccggttcggctcaaagccgcggtcgatgagccgctggcggatggggtcggacacgcacacgcggtaatcgagttggtgcagagcccaggtattgagcgtaccgtagacggcgcgggcgaacggccggccgagatagtcgagccggtagtcgctgtgcacggtgctgatgaccggcacgtgtacgctgggccgcagcatggcacccatgacgttggccatggagccgtggcagtgcacgaggtcatactccccgtcgcggatgatccttttgagtgcgccgaggtttgccaaaaagcccttgccaagcaccatcgtcgggatgccgagcgcggccgcgccgtcggcaaaatcaccgccgcggaagcacacgagctgcacgtcgatgatctgaccgagatatttcagcagggagtaaacatgcgtccgggcgccgccggtgtcgcccccgctgatgaggtggattactttcactttgccctccaaagcacttgtgcgcgccgcgaaaacacggtataatgcgctcgtacaggtgctgatacattcccgcgcgaaatcaaagcgcggattcagattattatactgtatgattccactatggtcaagttttggaggcccgcaatgacgaaaatttatctgatccggcacgcggaagcggagggcaacctctaccgccgcatccaggggcactgggacgggagcatcaccccgctcggcctgcagcagatcgacgcgctcgcgcagcggttccgccgcgaacatatcgacgcgctctactgcagcgatttgtcacgcgcacgcgcaacggccgaggcgatcacgcgctatcatgacattccggccgtggtcacgccgcgcctgacggagatctgcatgggcgtgtgggagggccgcgcctggggcgatatcgagcacgattttccggagcagatgcgctatttcaacaccgaccccgaccgctggtccgtgcccggctgcgagccgatccgcgacgtgcaaaagcgcatgaagcgcaccatagaggatctcgccgcgcggcacgacgggcagacgatcgtcctcgtgagccacggcatggccatccgcgcctatctgtgcacggtgctgggcatcccgaacagcgagatggccaccctgccctacggcgacaacacgtccgtgagcctgctgctcgtcgacggcgagcgcacgaccgtggagtattataacgacaaccgccaccttccgcccgcactgagcacattcggccgccagacctggtggcgcggcagcggcagcggcgcggaggatctgcgctatgagccgctgcgcttcccgcgcgacgaggcgttttacctccagtgctaccgggacgcctggcgcaacgtgcacgagacggacgagggtttcgtgcccgagctctacgcccgcagcgccgcccggcacgcgcaggagcatcccggctccgtcgtgcgcgtcctgagcggggaccgcgtggtcggcctcgtcgagctcgaccccgggcgcgacgagcagtccggctgcggctggatcagcctgctgtatatgctgccggagtaccgcggccgcggctgggcgatccagctgctgggctatgcgttctggttttatgagaatcacgaccgcacggccgtgcgcctgcacgtgtcggaaaacaatgcccgggccatcacgttctaccaacgcagcggcttcgtgcagatcgggcgcgaccccggcgtgcgcgcgcacctgctgctcatgggccggctcatccacaggacggtgacgcatggaacggtgtgatttcctgcccgtctccgccgaggagatgcacgagcgcggctggtggtggtacgatgcgctcgtcgtcggcggcgacgcatatgtcgatcatccgagcttcggcacggcggtcatcagccgcgtgctcgaggccgagggcctgcgcgtggccgtgctcgcgcagccggactggcacgacgcggaggccttccgcgccatgggccggccgcggctgggcgtgttcatcggcgcgggcaatctcgactccatggtcgcgcactacacggcggccaagcgccgccgcagcgaggatttttactcccccggcaagcgctccggctgccggcccgaccgcgcggccgtcgtctactgcaaccgcgcgcgcgaggccttcggccccgacatgccgatcatcctcggctcgctcgaggcgagcctgcgccgcttcgcacactacgactactgggacgattccgtccgccgcgccatcctcttcgacgccccggccgacctgctggtctacggcatgggcgaggcagcgacgatcgagatcgcccaccgcctgaagaaaaaacagtctgtgcgcacgatgacggacatccctggcacgggctacatcacacgtgacccctccgtgtgcaaatttgaccacatcacgctcccgtcgttcgaggacgtgcgcgacgataagcgcctctatgccgaggccacgcgcaccgaatacgccgagcacgaccccatccgcggccgcgccatgatccagccgtgcgaggggcgctatctgatcatcaacccgcccgccatgccgctcgacacgaaggagctcgaccgcgtggccgagctgccctatacccgcgagtggcaccccatgtatgagccgcttggcggcgtgcccgcgatcgaggaggtgcgctttagcgtgatccacaaccgcggctgcttcggcgggtgcagtttctgcgcactggcgttccaccagggccgcatgattacgagccgcagccacgcgagcgtcatccgcgaggtcgaggccatgacgcaccacccgctctggaaggggtacgtgtccgatgtcggcggcccgtcggcaaacttccgccacccatcgtgccgccagcagctggagcgcggcatgtgcccgaaccggctgtgcctcgcgccgacaccgtgcccgaatatcgacgccgaccactcggactatctcgcccttctgcgcaagctgcgccagatccccggcgtgaagaaggtgttcgtgcgcagcggcatccgctatgactacatgctctgcgacgataacgacgcgttcttccgtgagctcgtgcgctaccacatctccggccagctcaaggtcgcgcccgagcactgcatcgactccgtgctcgactatatgggcaagccccacatcggcacgtacgagcgcttcatggacgaataccgccagctcaaccacaggtatgataaggaacagtacgtcgtgccgtacctcatgagctcgcaccccggcagcacgctcgccgacgccgtggccctcgcggagtatctcaaccgccgcggccgccagcccgagcaggtgcaggatttttaccccacccccggcacgatcagcacgtgcatgtaccacaccggcatcgacccgcgcacgatgcagccggtctacgtcgccaagacgccgcatgaaaaggacatgcagcgcgcgctgctgcagtggcgccggccggacaagcgccggctcgtcattcaggcgctgcacgaggccgggcgcgaggatctgatcggcttcggcaaggactgtctcgtccgcccgatgaccgaccggcgcaaacccgccagacccgccgaaccccagccgccccagcgcaaatacggcaaggtctacggcggcggcaaaaagcccgcgtccgcccgcgccgcacagagcggcagggccggaaagtccgccaaatccggcaaacccggccggtccggaacgtccgccaagccgggcgcgccccgctccggcggcaggggcacgcagcccccgcgcgggaaaggcggccgccgatgagctatctctttctctacctcgccgccatcaacatcatcgccttcgccgccatgggcatcgacaaggcgaaggcccgcgccggcaaatggcgcatcgcggagggcacgctcttcgccctcgccgcgctcggcggggcgctcggcggcacgctgggcatgcgcgtgttccaccacaagacgaaacataaggaatttcgcttcggctttcccgcgctgctgtgcctgcagtgcgcggccgtggtgtatcttattctgatctggaagcaggtgctctgatatgacccccaccctactcgcctatcaaatcgacccgaaaaaactcgggaaaatgcagatcgtgtgcctgcggctcggcatccgggtgcaggcgatcgacccggccgacttcggccagacgatcggcgcgctggccggcgtgctgccgcgcgagccggacgcccccgccgccccgctcccgggggagatgctcgtcatggcgcactttcgccccggcctgctcgaggggatgctgcagggatggcgcgccgcgcacatcccgcccgtcgcgctcaaggccatgctgacggacacgaacgccgcctggacggcccccgcgctctacgccgagattgccaaagagcacgccgccatgcacagcggcggccgcgcgcacaaggcgtgaaatttcacgatttacagcaaaaaaccgattgacaagcgttcacgcctgtactatgctatggacacaggtgcgcacctaccggcagtcaggcgaggaaagtctgactgcttttgtatttgccgccgacattgccaaggggtcccgcctatgaaacacaatcagatccgtcaagtcgttttcccgatcctggccgcgctcatctggggcaccgccttcgtcgcgcaggacgtctgcgccgatacgatcggcacgttcacgttcaacgccgtgcgctatttcatcgccgtgctcgcgctgctggtgctcatcgcggtgctgcatgccgtgcataaggaccgcccgcagccgacagaggcggaaaaacgcgccggacgcagacagctctggctcggcggcttttgctgcggcacggcgctggccatcgcctcgaacttccagcaggccggcatcaccgccgggacggacgccggaaaggcgggctttctcacggcgctgtacgtggtgctcgtgccggtgttcggcctgtttttcaggcgcaaggtcagcctgccggtatggatcgcggtcgcgctgtcggtcgtatccctgtacctgctgtgcatcaagggcagcttccgcctcgccgcgggcgacctgctcgtactcgtgtgcgcggtgtgctttgccgtgcacattctggtcatcgaccacttcggtgcaacgtgcgacggggtgaagctcagctgcgtgcagtttctgttcgcggggctgtggtcggccgtgtgcatcccgtttttcgagcacgtggacgccgccgccctgctctcgtgcgcgctgccgctgctgtatgtgggcgtgttctcgtgcggtgtgggctacacgctgcagatcctcgcgcagaaggactccaaccccacggtcgtcaccatcctgctgagccttgagagcgtgttcgccgtcatcgcgggcgcgatcattctgcaccagcacatgaccccgcgcgaatacctcggctgcgcgctgatgttcctcgccgtcgtcctcgcgcagatcccgctgccggccaaggccgcccgcgcggacaaataagcaaaaccccgccggtcggcggggtttttcgcacacacgcagctgcgcgcaaatgccccttgcatttttgcccaaatggggctataattcttgtcaagaaattcacagaaagtgtatgtacaaggaggtcgattccccatgaaactgacacccgaacaacaggccgtgctcgacggcagcaagggcgccgtcatggccaaggtcatgaaaacgctcgtcatgtacggcgacgccttcggcgcggaaaagatggtgcccgtcacgagcacctacggccacacggtcatcagcttcggcatcaacgccatgaagccggtctacgacctgtatgaccagctgatcgaggccggcgcgttttccgagcagaaattcaccgccgacccgctcccgctcgacaagaacgtcccctcgaacccgctgcaggatttggtgttccgccagttcatgtataagcagcaggcgcgctacgaggcccagctgagaaagctcggcatcctcagcgacaaggactacacctgcacctgctacctcgacgaggtgggcaacaagcccaagcagggcgaggtgctctcgtgggcggagtcgtccgccgtggtgtacgccaacagcgtgctcggcgcgcgctgcaaccgcaactccggcatgatcgagctcatgggctctatcgccggctgcgtgccgtatttcggtttcctgaccgacgacgggcgaaaggccgactggatcgtcgaggtgcgcacgacgaaaaagcccgagccgcagctgctcggctctgccatcggcatgaaggtcatggaaaaagtgccgtatgtcaaggggcttgaccagtggatcggcacggagatcaatgaggatgccatcgcgtatctcaaggacttcggcgcggccaccgcgtccaacggcgccgtgggcctgtaccacatcgagcacctcacgcccgaggccgtgcagcagggcgaggcgctcatccgcgacggtgcgcccgtgtacgtcatcgacgacgcggagctccagcgcgtgcgcgaaagctatccgtgcgtgtggaagaacctcaacgccaagccgaagctgtgcttcatgggctgcccgcacatgacgctccaccagctcatcgacacgaccgagcgcgtcgaggcgagcctccgggcgcacggtcagcgcaaggtctgcatcccgacggtgttcaccgccgcacccggcgtcatcgaggaatttgaaaagacagagtacgcaccccgcctgcgcagcaccggcgtcgtgctcagctacatctgcccgctcatgtatatgaacaacccgctcagcaaagccatgcccgtcatcacctcgtcgaacaagctgcgcacgtacacgaccgcgcgctactacaccgaggatgagatcatcaccatgattacgaagggggccaactaatatgaaacagtttcagggccgcgtcatctgtcccggcacgtgcgaggcggaagccctcgtgtcgcacggcggcttcaacacgctcgccagctatcagatggccttgatgttccacgacaagcaggtcaaatgcggcgaccagaacaaccccgacctgtataaaaagccgatgatcggcaaggccctgtgcctgccggagacgatcggctcgaccaccggcggcatggtgctctacacggcctgcgcctccgggcagcagccggcgtgcatgctcttttccaagcacatcgactcgctggcggcctcgggcgcgatcctcgcgtccgtgtggacggacgccgatatgccggtcatcgactgcctgggcgacgaatttctcgccgccgtgcagacggggcagaccgtgcgcgtgctcgacggcggcatcgtcgaggtggcataacactttatggaaaggaaacggggctgaccggccggtcagtcccgtttttgcgccatgcgtcggaagccatttcatcgaggcgcgaatcatgcatcattccaagatatctgagccgcaggggagcccgagggggcaaggcccgcttcggatgagatcatgcatcgcccctggcgatgccttctccttgatgagaaggctttcaacgcctttcagcgctgccccaccgcagtccgcgcattgtcttttcccgccgcacgtgctacaatttattattctcgtcttgtcaggaggtgccgccatgcagccgcgatcccgccgcgccgtcatcgtgctcgatgcgctgggccttgccgcgctcgcggcactgttcgtgctctggtgcgtgcgcacgccgggtctgtccgtcccgggcggcatcgccgccgggtgcagcgcggcactgtttgccgccgtggggctgcggttcgtgcccgcgtgggtgcacttctggcagcgtgagggcgatgcgcccgccgccgttccggcggccgaacccgcgcacatgggctcgcgcattttcgctgcgctgctcgcgctcgatctcgtcctgctcctgctcacgtggagcgtccgcgccctcgccgggcagccggaaacgctcgcgcaggcgctcgaattctggcgctgcaccgacagccggcactatcttgacatcgcgcgcgacggctacatcgccgccggcgatcccgaccgcgtcgtgcagctcgtgttcctgccgggctacccgctcgtggtgcgcgcggtgatgcgcctcattccctcggacatctgcgcggggctgctcacatcggcgctgtgcttcgcgggcgcggggtgcatgatctaccggctgctgcggctcgacctgccgcaccgcgacgccgtgcgcgcgctgcgctttctcgcgctcgcgccggggtgctttttcttcgccgcgcccatgagcgaaagtctgtttctgctgctgacggccgcggcgctctacctcgcccgcacgcgccggcccatcctcggcgggctgtgcggagcctatgccgcgttcacgcgctcgctcgggctgctgctgttcgtgccgctgctgtgggagctcgtgcacgacgccgtgcagcgccgccgggtggacacccggcaggtcgtcggcgcgctgctcgtgccgctcggcttcgcggcgtattgttatatcaactggcgcgtatctggaaacccgtttcagtttctcatctaccagcgcgagcactggaaccagcgcacgggcctgtttttcagcaccgccgcgtatcagacggactattttctgcgcagtctgacctccggcgtctggcgcgacgcgctcggcctctggctgccgaacctgatcgcgtgctttgctgcgctcggcctgctggccgcggccgcgccgaagctgcgcgcgagccagacggcgtggtttctcgcgtattacatcgtcgccgtcggcgcgacgtggctgctgagcgcgccgcgctacctgctcgtgctgctgccggtgccgctggcactggcgcagtgcacgcgagcgcgcaccgccgggcgcgtccttaccgccctgagcgcgctcgcctcgctcggctatctcgccgcattcgccctgcgctggcaggtgtggtaaggcggcaaaagaaggcacacccatcgttccgctcaaaaaagcgcaaataaagaaagagggccgcctgcgtattcccagcaggcagcccatcgcagctgtaacttccgccgtccggaagccgattacagaattttcggaatgagaaaggccaacagcaaaagcacaacgatcgcaaccatgatgttgccaagcagattgaaaaagaatttcatgacatcatccactcacaattcacgcaatttccggcactccggcaatctctgaccgccgccggtaccgtcacagaaaacacctttcaggtatcacagatccgcgcaatgcgcaatcataaattgggaattttttcgttttttgggcttttctcgaggcagccccgcttaagtgtccttttaatgggacagcaaatatgctatcatcgaaccaaatcgcaaggagggatcttatgctgcacctgctctatggccctgccgccagcggcaagaccgacctgctcatggggcgcatccgcacagccgtcgcggcgcgcacgccggggcaggtgctgctcgtgccggagcaatacagccacgaggccgagcgcgcgctgtgcgccgcctgcggcgacagcctgagtctgtacgccgaggtgctgagcttcacggggctggcgcgccgcgtcgcggccgagaccggcgcgggcgaggcgccgctgctcgatcagggcgggcggctgctgtgcatggcgctggcactgagccaggtggcgccgcggctgcggctgttcggcgcggccgcccgccggccgcagatgcagcagacgctcctcggcgcggtcgatgagctcaagaccgcgtgcgtcacgcccgacgcgctcgaggccacggccgcgcgctgccccggctatctgggcgacaagctgcgcgaccttgcgctcgtgctcgcggcgtatgacgccgtgaccgcgcaggggcacgcagaccccaccgaccggctgacccgcctggccgagcgcatccccgcgagcacgcttggccgcacgggacatttttacctcgacggcttcaccgactacacgcggcaggagctggccgtcgtgcgcgcgctgctgaccgccggcgcggacgtgacggtctgcctcacgctcgatcagctctccggcggcagcgagatcttcggcgctgcccggcgcacggcgcgcgtcctgctcgacatggcggacgactgcggcgtgcaggccacggtcgagtcctgccccgcccgcgcggccgacacgccgctgcgcgtactcgagcagcagctgttttcctacacctccgcgcactttgacgatcccgcgcagacgatcaccgtccacacggcggacgatctcgcggccgagtgcgcatgggcggccgcccgcgcgctgcagatcgtgcagtcgggctgccgctggcgcgacattgccatcgccgtgcgcggcttttccgactacgcgcccgcgctcgagcgcatgtgcgcctactacggcgtgccgctctattttgcccgccgcaccgacctgatgcaaaagccgctcgtggcgctcatccgcgcggcctacgacatcgtgaccggcggctgggacgccgaggacgtctcggcctacctgcgcacgggcctcgccgggctcacgccggaggagacggacacgctcgaaaactacgtcctgctctggtccatccgcggcagcgcgtgg

SEQ ID NO: 13954 - DNA, 173922 bp, Unknown
  gut microbiota DNA sequence
gctccggttgctccgcgcgatggcttgccggtatcggtgctgccaacgtaccaattgccattgtcaccgatgtgcggcgtaacgccgtccgcaccagcagcccccggtttgccatccgcacccttgaggtctgccacggcgataaggtttgtccacgtgctgccgccgtccgtgctgtactggatgtagccgtccgccacacgcaagtccatgctgccagcaccgccgcctgaccgcgccgcttcgttgatggccgccaccagcgtgtcctttgcccccgtcgccaggtcgtcaaggtcgccgatctggcgctggatcgtctgcaacgtcatctgatctgtcggggtataaacgtagtccgacggccgggcgcgcttatggaccgcaaaatccacctgcaccttggtatagccgccagcgtcgtcgatgacgtaggcgtaggccgtcagcgggtgccagtcctgcagcagctcatccgggatgatggccgtgccgtctgtgccgacgtccacgtccacgctgcggccgaagcacctattttgatagtggacctgtttgacgccgtcgccgtcggtgatcttgacccgccgcccggtgtcccactgccacagcgccccgcgcccatctgcgattgtgatagtcatgtggttgcctcctttacctgtacctgcccacaacatagtagctgatctgcgggctattaaccgtcgcgtcagatgctctcacgcactgatacgccggcgcgtgcgtcagccgcgtacctatgtcgttttccgtgttagttgcaagccagatgttgccgctcccaaccgtcggcgtcgcagacacgacagggttctcaacaaaagcaaacggatattggcgtgctgccttatttgccgcgagacccatccacgatgcggtatacagggggccccatgtctgcgatgtcattgtcagcgagggggcgtcgaacttcgcccacatctcagcaacaccgctcgcccatttgcgccacgtccacttgccggtcgtgccctggtcgatgatggtgtccgcactggagctgcctccgggcgacgtgctggtcgaccggctgccgctggaggagacgctgccggtaagagactttttgccccagccgatcgtcatgctggacttgctgccgaccagacttgtgtccagcttggacacctgcatgatggcgtcgatgccatgcggaggagacaccacgcggacgctgtcgccgatcgcaaatgcctcgatcatgatgtcctgcgccgacaggtccgccgccgtgacctggatgccgcgcgacaggccgctgtgctgtgccagatacgacgcggccgttgctttgagcgcggacgcatcgtctgtatcggcttgcagcgtgccgtcgatgcgcccatagatgccctctgccgcggcattgacaagatacacctgcccgccgttgacgtcctcgatggtcagcccgtccttgccgacgggatagacgcgcgtgacaaggtccgcgccgtcaatctcatccgtcaggcctaggagatttttgcgcagctcgaccgtctgcgagcagcggtggtcatacgacgtcaggcagtcgagatagacagcgccgtccgcatagcggatgcgcagctcgccgcctgagaccgatgctgcctctttggccaggtccagcatggacttgtactcgctcgcggccagcgtgatcgatggcagcgacgcgccgaccacgccgagcttgatctgcttgccggccagacagccggcgttgtactgcgtcaccagcgcgccgaggtatgtcgacaccgccattgcattgattgtatgcggcggcttgcagatatccgcaagccacatcatggcactgtcgatgctgtaagtgcgcatgccgcgcaggtccgtagtcgtgtcgacaacggacccgcgaaagacctctgcgccgtctttgcggatggagatcacggacgcgcgcttgacgggcacgtcgcgcatgacgttgctcggcggcagcttgatcgtcgcagagctggcggagccgacggcctcgctgatcgtgccgtccacgatctcgtatctcggcatgccggccgcaaaaagcagccggccgtcgacataacctgcatacatcacatccaccccctgcggcccgtcagggtgatttgcccggcagtagcagcgaccgcaaaagcatagtcctgctcgcgccggatggacaggtacggactgacggtctcgcccgcgcgcagctcgaccggcgcggacggccgcgagcagcgcatgatcgtcgtgtcggccgtgacgccgccgactgccgggtacagcaggcgctcgctggctaaaaaggccagcgacgtcggcgtagccttgtagatctggatgcggcgcaagtagccattttggtctaccggcccgccgcgcgcgtgcatggtaacatacaggccattggcaggcacatctccgcaccagcgcgatccgctgttgtagacgttgccgtcagcgtccgtgatctcataccagccctgcgtcgcctctgccgtcacgatgcaggacccggccgtaggccacggcagctgcacgcgcacccagttttcgatcgacgggtcgtcaccggcccacacggtcagctccgtgtccgcgccgctgccggacacatgcgcgtatgacgatgacgatccaccgacggtcagcgtcttgccgaccattaggttactcgacgctgccagcacggggatggtgatggtggtctccgtcggctccagcagatacggatcagcgtcgattgtgacatcaaaggtcgttttgtccagtgatgtgtccggcgcgccgacggtgcaccggccgatgtaatagccggctttgttgctcagctccagcttcagccgccgcccatgtacggcggcggcgaagctgtaaaactcaaaatccccggtcggtgcaaagcaaaagcggagcttgatctgccggttgccaaataccgggccgcccgtcagcgcgtcggtgagatcgatctcgccgtccgcgcctgggacgctctcgctctgcgtcttgatgtccggcaggccaacctgcacgctcatcagatccagcgcggtgtactgtacaccgccgattttgcacgtaagtgccattatatcgtcctcctgtccttgctcgcgtagatgccgccgagcgcatagtccatgcgcgtggcgacagagccgacaagcgcgtctccgtccatgtagatctgcatcccggagatggcacgctcgagccgatccatgcgctcgagcacggcggcaacgtcgctgccggcgcccggagcagcggccgcttgcagcgtcgccgcctgcgcatacagtccctgcatatccacgccgatgacgtactgcggctgcagcgactccccgatctggcgattgatgtcgccgatcgtagacgcccagccgtcgccgatgccagccgccatgttttggccgatatccgcaaagacgcgcgacgggctgtggatgccgagcagatttttgatccagctgacaagccctgtaaagagattggacacatccgacttaagccgctgccactgctcgacgatgccttgccggatgccatcgacgatggacttgccgatgctccagtaggatcttacgcaggccaaaaagccgcggacgatcgtctctacgagacgcggcacagccgcgatgatgtgcccggcgttggacacaagcccggacgccagcgcgatgacgatctcgatgcccacgccgatgatctccggcatcatcgcgtaaaaagactcgaccagatttgtgatgatgcccggtacggcgtcgatcagctgcgggatcgccgtgataagcccgcgggcgagtgccagcatcagctgcatcgcagcctggatcagcagcgtgatcgactccggggacgtgatcgtgtccacgatgcctagcagcgcggacatcgccgcagtgatgatgcccggcagctgatccgcgaggccgaggagcagcgcgcccaccagctcgatcgccgcgcccatcaggtcaggcagcgcggacagcaggccggtcaccagcgccgcgataaaggtcagcgcgacagacatcatgcgcggcgcttgcgccgtgagctgcccagacagggacacgacaaggtctccgaccgctgccgcgacctcgtcgccgccgccagtcagcatttttgtgacgccgtccatgatcagcgtcagcgtcggcagcagctcgcctgagatgttattttttaagccgctaaaggcatactgcatgttttgcaggctgtcctgataggctgcggccgccttgaccgcgtccgagcccatcacgccgccgaggtcgtgcacctgcgcgcgcatatcggcgacgtcgtccgcgcttgtgttaagcagcgggccgagctccgtcgcgcccctgccaaggagtttcccggcaaggtatgtccgctgcgtctcgtcggtcacattttgcagacctgcaatcgtggcatcaaaaagctgctcctgcgacatgccagcgatctgctcctgcgatatgccgagctgcgcaaaggcgtccgagccgctttcggcagctgttgccagcgttttcatcgctggcttgagcgactcaatcgacgcgccgcagtgctgcaggacaaaatcccactcctgataagcatcggacgacatgcccatcttttgcgacattttatcgattgtatcgccatactccgccgcgccggtaatcatttccttcgccgtgtcgccgatcgcgctcgcggcggtcttgattgccgacgctgccaggtcggccagcgtgccctttaagacagaccatccgccggaggctttttcggccttatcgccggcctctctggctgcgtcaccgacatcagcgacggcgtcgtccgtcccggaggcagctgcctccagccgcgtgagctgctggcgcgtcgactcgatctctctctcaaagtcgcggtactgctccgggctgatcttgccatcggccagctgctcggacatcgactcctgcgctgcgatcagcatcttaagcttgtccttagcgccggcgatcgactcggcgaggatatcctgcttttgcgcaagcaggacggtattggtaggatcaagcttgagtagcgactcgacgccgcgtagctctccgctcagatcgctcgccgacttgcgcgccttaaggatcgcgtcgccaagctttgttgtgtcgccgccgatctcgacggtgatgcccttaagtgtcgtacctttgccgctcaagcgtccacctcctcctgccgcccgaaggtgctgcgcagaccgtccacatccggctcagtctgctccagtctccatgcgttatccagatactcgcggccgtcctccgactgcagcttgcgcgcaataaaggcgtcgcgcagcagcagcagatagtcgtccagcagcagatcgcagacgtccggcaagggcatgttggcatactgtgccaccagatgctcgccgaccgtctcgatcgtgtagtggcatcccgtaccatcaccgtcatcgggatagtacgggatggtcagttttttgccttggtcgcccccgcgacaaagtcggagtatacggcaaaaaagccgataagatcgtcaagggcaaaaagcccggcgacctccttgggcgtaaaggtcgcgcccgtgcggttgcagttaaggatgtcgcagacgatgtcgatcatctcgtccacgcctgcgctgtcctgcatagccatcatccgcttaaaaacgctcagcggcggcacggtcagcagcagctcgcggccgtcctgcagctccagagtaaagattgccttgtgctggccaagtgtaaatcgatttgtcatgccgtgtacacctcatcgtagtagatcagcgtgccctccgcgtccatcgggtcggcagcaaactcagcgtcgatgacggtctccttgtccttggcaaaggcgatctcaaagccggactggtttttgccgacaatgcgcacgtaaagctcgcgcttgccgtccttgtcagcgtgcttaaagcacagcacgtactttttgccgtcggcgttgtcgacgccgccgatcttaacggatcgcttcgcgggattcccggttgcagcgtcggtctccgtcacgcgggccgtcgcgctgagcttggccagcgtgttgccgtcccacgtcatcacgccggacttaagcgtcacctcctcggcggtgagcaccgtcttggacacaagtccaagatcgtccttggcaacataaaaggtgggcttgtacgacagcgtcgcgccgccggagatgtagcccaggatgttgtcgtccgtgcagatcgcctctgtctccggcacggtcgtgccggtgtactcctgcacgtaaagcttgccggatccaagcgtgatgtcttttcgttttttgagtgccataattatgcaaatcctttctcggtgtacgtaaaatcgtacaccgtctcaaaaaagtgctccgtgtcgatccactcgcgctcctgccggacgtactcaaggccgagcgcgtcgagccgctgctcgatcagggcctcgagatcctcggctggcttttgcgcgtagagctcgatcgtgatgttgtgctcgctgatgccgttgtacaggtcggcgccgcggcgggtcgtccggtcgtgatagacggcatacggcagcgacggcggcatagcccagcacgtctcgatgtgctggatgccgtcgagcaccgtggggatgatatcagccaccgctcagcgcctcctttacggcgtcgaggtactcctcgacgacctgctttttggcaaaatccaaaaagtgcgtcccctcgacgcgcccgccgttgaccttggcatggccaaagttaagcaggtgcgtgaggtaggcgcgctccccgcgtacataccacgttttggcgtagtttgttggggtgtcggatgtcgtctttgaggcgatgtgcttgacatactcgccggtgtcgcgtggagccgtcgccttggtcagcttgaccagcttgcgcatggcgttgtccaccagtgtgcggagcttactctgcacgtcggcgttgtactcctccagcgcgccggcgatggccttgtccagggtagagatggttacagtctcgtcgcgcatgccgtcacctcaccacaatctcaagcccgccgtcccgcgtctcgtaggtacgctcgacgatgtagcgcttcccctcgtgctcgacaaatcgctgcccgtcgtagtcgcgccagtcagccagccgaaactgcaccgacgggtgcaggccgacggcggccgcctggtagtgctcggcgcgcgtgatgctttcgcgccggcaaaacacctcgtgcttgccgacgtcgttgccgcgctcgtcaatggcaatcagagtgattacatcatcgtacacacgtctccctcctttgccggcgtgtccaatttggacacgccggcgtgttgtgccttagccctgcatctgctgatggcagagccgattgttaattttggcccgcaggtagcgcggcatcgccatggtcggctgctgcctgcgctcgtgcaggtgcgcggcatacatctccatcagcagctggtcgccctggtcgctcaggtcgaggacgacgccctcggtgcgcagcatcttggccgcggccgcgatcagcgccgcaaagtactcgtcgcgcttggtgtgcgtcacgccgagatcagccttgagcagcgcaagcaccggctcggccgtaccgccggccatcagttggcggagtcagcggcaaaagtcgccgaggtcaccggcgcgacgttgtcgtagcgcaccaccacaaaagcctcgccgcgcaccggcttgccatcgtagcgggcggtcgccttaaacgcagtctggtcctcgataaatttgacctccgtggactgctcgagggtcgtgccctcgcgctcggccagcagatacagatccatgtagccgccgatgatctcgttgtccggcacaaagtccagctccacgatctggccgccgatgatcggcatctcggacgtcacgccggcagtcagcgcggcagcactgtcaaaggcaagcgccttgctctgcagcgcgatgtgtgtcttgtgattgcacacccacacaggcgtgccgttggagtacttggggtcggcagtgccgagcgcggtgatcagatccgcgtaaaattcctcgccgtttttggcggcggagttggacttgatgacgttggtcgtcgcaagcgccgtaaaagtgccctggttggtgccccaccatgcgggctgctcggcggctgccagtctggtcgcaatgccgaccggcatcttggtgccggtgccaaaaaggatggccttgtccagcgcgtagccgatcgcctggccgagctggtcaaggatctcggtcgccaggccgatgttgtcgtcgtcctccaagtagcagttggagacaaagacgtagccgccgaccttgtagccgtcggtctcgacctggttgatggtgatagtcagctcgttgagcgtgccgaccatctccgtccacacagcctccggcacggtgccgacaatgttctgtcgcgccttgccgcgcacctggcgcaggcgggtgtagccgatcagcttgctgtagcggttgatgttgtcgcggacgatgtccagcatcacctcggggatgccgagggctgcgccggacacggcgcgctgctggccaagcatctcacgggtgcgggtcaaaaatgcggtgacgtcatcgcgggcaaaaaatgcgtcgcgctgggcgtaggtcatgccgtaaaagcggctgcgggcatcgccgcccgcggtgttggtaggcatagttttgtgtgctcctctctcagtgtgatatgtggtgttggtgtgggctgcgctgcgggcctcggcggcgttggcttcggcggcctcgatctgctcggtcaggctcgcggcatcctcctcggctgcctcgatgtctgccgtcaccttgtcgcggtccgcctcaaactcgccgattgccgtctcgcaggcggcgcgctcgtcgtcggtcttggccgcctcgatgtctgcggccagctcgctctcgcgggtctccagcgccgcagcctgctcacgcagctgtgcaagcgtcgcgttgacggcggacagcttattgcgcagcagcagtactttaagtgccatgtttatctcctcctgtcagtctgttgatcatcttggttttccatgtctctgcctgccggcgctggatctcggcgagatccgcatggcgggctttgacggcggtctcctcgtaagccggataggtcacgaccgagacctcgtacagtgggtttaccttgttgatctcccagcggcactgtccgccgccgaggtcgacaaaggtctcctcctcaatgtcaaatccaaacgagcactggtcgacgtcaccgcgctggacgcgcgcatagaggctcatggcgtcggcatcgtcccgattgattttgattgtgccatacaggccgcgcgcatcctcgcgcagcgtcagcgtgccggccttggtgcggccgagcacgagccgtgtgtcgtggtcgatcagcgcgcggatgtcgccggacagacatccggcaaacgcccccggcttgacgatctcggtcgccccgtcccacaggacatagggactgtcaaacacggcaaaatacccctcgatgatgaggtcgtccccgtcgtcgcgggtgcaaaactgctgcggcgtgctccgcagctgccggccctgccggctgttgttatcagacatctttgccctccttctgctgatcctggatcagctttttttggtcgccgatcatgccggcggggatgtagttttcaagcatgacgagctggtcgaggtcctttttgggcgtcatgcccagccagtcgcgtacttcgtttccggtcatgagaccgcgcacatacaggtcgcacgcgaccgacgacaggtcggccatgctataggcatacaggctgcgcggattgaggcggaaataccgggacggcgagagaagcagctttttggtcagctcctgctggatggccgtggcgatctccatcaccgtcgagcgcacgtagttgttgtaggcgtcctggtcatagtccccgacgcccagcaaaaacgccgggacatgcattacgctggcgaccgtgcgcttgtccagcgtcacggcgtcgttgattgccagatcctgcagcgacaaaggcttgatctgctgcacgtccatcaggtccgcctgcaccacccacggctctcctgcctcgtcggtgctcagataatcgtccaaaaatttacggcggccctctttcccggcaaactcctcggcgataccgtccacgcggacgataatcgacggtttccactttgtggacataaagccctttttcgtggcggcggcctgtttgaggccggctgccacgtcgcgcagctgcacccggtagccggtgccgcgccacggataggtcaagtccgggtggagcacaaagtgcagcacctcgtccggcgcaaaactgcgcccgcgccactgcacgacgtagctgtcgccgaccggctgcgcggttgcatccggcatcggcatcaggtcgtccaggtagccgttggtcgtcaccggcagcacaaaggcgttgccatcgccggccgtcagcattgtgcgcacgatccactcgacccacgtcttgcgcgtggtcggaccgtaggggttgatatccaccttggtcgccagcgcatcgcgcacgcgcacgtcgcccgccttggtgttttccatcaggtggatagtcatgctggagacgcttccggcaatcgcatcgactgccgcggcgacctccgggcagtcgatcagccgggtgtagccgggcacctgcatcgcagacccgtcgctgccgacgatccacccgattaggccgccggcacctcgctttttggccgccttgcggcccgcgaaaagtctcatatctcacgctcctcacgcaaaccagccaaggtctttggctgctttctcgctgttttccagcatccggatcgccgcaaagacggacgcatcaaagacgtcaatgcgcagcgtcggctcgattttctcatactgaaccatgtcgtccgtcttttcgaccgcccggacattttgcacgcagtactcgtagggctcggcgtgcaggtagtacagcaggccgttttttgctgccgcctcgatgtgcctaaagccctccgattttttgtaaaaatactgcggctgatcgacgatcttaaatccggcctttttcatgccggcaaagtactcgcggcaaaatttccggtcgtgcccgacctcggcgatcttaaagcccatctgccgcatccgcacaaaccacgcgacgatctccgcgtggttgacagacttgtcattgctcatgctcagccagccgtcctcctgccagccaaacagcgggatgttgtcctcctcggccttgacggccgcggccgtgacgggaaaccaacagtgtgggatgatgatgttgacgccctggtacacgccgtacaggcaggccgccgtcaggtcgtgcatcttggacaggtccgcgccgccgtaccacttgatcggcagctttgccagctgctcgattgtccagtgatatttggcatccgacgcccggaactccgcgatgttaaagtaggcccgcatcgcggacgtatagacattcagcgacttcgcaaaaaagtccttgcgctgctgcgggtcgttttgcgcctgcagcgcatcgttcatgatgtcatttgggcggatggactccccatatgcggggttggccatgcgctgcacgtcagcgttggtgtagtcaacgttcccggcctcgtcgactggcgccgccgcgataaagacaaacagcgcatccgcgtccgcggacttgatcgtgccgttgaggatctgccggcagtacttaagcctgtggccgcaaaagctgttttcgcggtcgccggccgtggagatgccgatgacgagcttgttggtgtacgccttggtcgcctccttgagcacgttgtactgcttgggcgatttgtaggcgtgcagctcgtcggcgatgatgatattggcgttaaaactatcctgctggtccgggttggacgccagcgcgttgatgtagatagacccatcgccgaccgagccggagatgctgcgctctgcgttgttgtccaggatgcgcagcccattggggtcgtcgtcctgcgacaggccgagccgcctgacgttgtaggccaaaaagccaaaagactcgagcgactgcttgagcgcagcagacacgatgtataccttggacccggacggcgactcgatcagcgccagcgcccaggcgagcgcggccgcaaaggtcgtcttgatgtttttgcgcggcacaaagataaacgcctccttaaagcggcgctccgacgtgccgcggaggtaaaagccaagcaggttgtacacgcaaaacttgtggtagggcagcagcaaaaacggctgcccgcgcagcggtgtcgcatccaggcgctgcccctgctggtggcacagcatagtctcgatcagctcgatcgcgtactccgcctcggccggccgaaaatcccagcgcgggtcggcaagatccgtggcaaagcgctcgcacgcctgccggatatccgggcaggcaaggatcgtcccgtccaagcatccggtgacataggcaaggacgtccgcggcgttgcggtgattgccgagctgcgtgcgcagccggtctgcatccgcgccggtcatttccctgccctctctcgtgcctcggcgagtgcgcgctccagcgcggtcggcccggtcggtgctgccttcgcgtttccaagcacgcgccgctggccggtcggcgtcagaccaagctgcgccgagatgtcgacgatctgccctcgcagcccctcgaccacggagtagtacgggtcttttaccgcgttggtcgctccgctcttgttggtgtactcggtcacaaactcgccgccgttcgcgcgccagtcgcgctcggcctttgcaagctccgtctggatgcgggcgagtgtcttgatgatcggctcaaacgcctggttgtaagtcccagcgagccgcatgttctcgcggatcgcatcctcgcgcttgctcatgtctcacgctccttttgtgtccaattcggacacggttcctgccacgtttttggccgggaatgattcgtttttgcgcaaaaatcgcagggccgcaaaaatgccgcctccaaggttcccgcgcgtgcgcccggttgctttgttcccgcgcgatccccccgcgccgaaaactcggcgcggttggaaagagtcccccccgccggtccccggatggtaggcgctggaagtcacgagagggggggcttgcgccgctcggcgcgctgtcgccactgctcgcccagcggcgtgagctgctcgctgttgcggtcgtgcatcgcgtcgtggcatcgcgggcaaaggctgacaagattccaggccgcccaggcatagcctgggtagcgcccggccgggaaacagtggtgcacggtcgtcgccgcgcggtgcttgccgtatcgcaggcactgctggcacaggtagtcatcgcggcgcaggatgcgggcgcgcagcggcggccagcgcttgtctgcgtagatgccggtcgccataacgggctatcacctccgaggagaccggcaaaacaaaaagagccggagccagcaaacaaaacacacacgtgttgtttaccggctccggctctcaaagcactggcctctcgatatgtcgattataatctcgtgtttgcaatcgcggcaaaacactgggatgttgataccctccgtgtcgctgcggatctttgccagccgccgattgcggtggcatactgggcagatgagataacccgcccttatggttaacattttaccatgcgtgtcctgattttgcaagtaaatccctccaatttgtttgggctgcgtctaaagatatacacaaccccaagacagataatataggtgcctactcgcggcgcgcgctgcgctccggcaggaggtacactatataatcatagctgccatactcattttgtttgtggtcggtgtcgaggacaaacgcacccggcggcgccgtgaccgtcactgtctcatccaccatctcggactcctcgaccggcttgcgcaggttgcggctcgcgttccagccgcggtccccgaccgccgtggccggtgcgtccgggttgcgctcgtggagcaggtactgtgccagctccagaaagtcgtcgtgcacatacatctcggtctcgccgattggcaggatctcgacgttgctgccgttgggccacagcgcgcggatggtgtcatagtcgccgctgcccgtggcgctgatgatcagatggtggtgcaatcgtcggctgccgtcgcgctggagctcctgcgtgacgtacacatagcgcagctcgcgcccggcccgccggtactgccggcgcatccggtcgaaaaatgcggccacctgctttttggccgccttgcggtttggcggcaggtgctcgtcgtcgtaggtcagcgtcacatacagatcgcggcgtgtaaagttggccgcgagctgcatctgcagcttttggtacgcaaagcggtaatttaacttcctgcgcgccgccgtggagcacttggccttttcggctcgcgccctcggcgtgtccgttgacagcacctgcgtatagcagacagcgcgcacaagacgtccggcggtctgctttttaagtcgttttgtttttgccatgtagcctcctaacaggacgcaaaacggcggggccgcagccccgccatccctttttacttgttttcgggcggcgcgaactctatgccgtaggcataggccacctcccatttgttgtcctttgccagccgcgcgagcctggcctccgcctcagcgtggccgacaaacggtcgctcgccgaggatcggcagccactcgtgcgtccgcggcgagcgcagacacagcacccagcgctgcagatcgtccacgcgccggcggcggacggcgaaaagatagtcgcgccgcttgtacgtgacgctatgcatcgctgtcgccgtccagtctctttttcaggcgcgcgactttacgtctgcgccagtcgcgcacatcatctgcgcagcaaaacagcatcatcatctgctcgagcatgatctccacgtcggcgatctcctcggcgatgttttccggcgagtatttgccgcgcaagtacttgcacagctctttctgcagctcgctcatttcctcgaaaatcatcacgatttgcggcagcgagccgtaggtgtccagcgctctctgcagcacttccgattcatcgatgtgttcagccatcgctttctcctccttctggcagcaccatcaagcgcccggccttccccagcgctaccacctcgcacagttgcttggccgatacgccaagcgcggctgccgcacagcggactatgatgtccatgctcattgtctgcttgtactcctccggctcaaagccgagatccacgtaggccttgagcttaaccacagcttcctctgccgccagcagcaccgcacagccgtggatgccgcagttgtgctcatagccgcaggcgagacagctgtgtttgaggtccccagtatggatcgccagctcgtgcagccgcagtgacaggccgaccagctcccgcgacgcatgattattacttgccatggccgccctcctgctcgtcgattaaaaattggtggtgttgtagcagctcaaaggccgcctgcatcagtacatcatcacagtggtcgacggcatgcagcgggcacttgtcgcagttttccaggcttgcgccggtgcaaagccgcatcgtatccattacctcgtctcgtgtcatgccgttaaaatcccagcgcccgtcgacgacgccgcggatttctccctcgcgtgtcgtcgcaagcgtccacctgtaatggcgcgcagacttgatgtcatacgtcggcttgccggtgtactccacccagaggtgctcgagacgagcacctgtggagtcctcccagtctggcaaaaacgcgacggcgtcggcgctgtccagctgcgcaaagctgatgcgcatatagtcggcattgctcatgccctccggctgcagggccgggttgatgggcgtgtggccggcatcggcgatgtccgcagcggcgcgggcaaacttggccttatagtacgggtctccggtgagcttacctgctatgtagattttcatgcgtcgtcctcctttttgctctcgcgctgcggcagcaccgtaaggtgcgggttgtccgtccggcagagcaaatagtccgtggtcacgccgaggatgtcggcagccgcgaccagcgcgtcgagcgactcgacagccacgctcctgtaaggcgcccaatacgtgccgccactcgcaagccccgccacagtggtgtgcagcgcctcggcgactgcctcctgctcgccgtattcggcgagcgcgtgcgtcagtctgccccagtagatgcggcacttgctcccgcgctcctcgcggcgcttggcagcctcgtcgttcgcgcgctgctcggcctcggccttatcctcgcggatctgcaggtgcctgtccttggcgaccttgcagtatttgtcgcacgtggcgatgtcgtagcactccatgcagcaggtgtgctcgcagctgcgcatgtagttgccggtcgtcttttgcagcgactttaccacgttgccgcacgggacgccgcatgcatacttgcacttgcgggcggcgagactgtcgcggtcgctcaggatgcgctcggcctcgccgcagcgcatggagcgcaggccgtcctggccgttgcccttgaccttggcgatcagctgctggtcatcctcggagcacttagcaatctcgtaggccacgctctcgggcatgcggccgtcgtcatagtactgcttgatctgcgggatcagcttggtcttgatcgtgtccagccgggcgatcttggacgcagagatattgcacgcgctggcgacgtagtcgcgcatccggcccgggaactcatagccctgggacttaagtccatacagcaggtcgcgcacgcggtcgacctgcttggaggtctcggccgaggtcagcacgcgcgtcgcgctgttggcctggatcagcatcagctcctccatcaggtcgtcgcctggctcgcgcacaaagcacggcgttgtctcaaagggctttgtgtcctcggcgagatggtcgtccaggatcgtcatcagcgcgcggtgacgacggtgtccggagatgatgatgtagccctcgccgtctccggacggccggacggtcagcgggtcgagcagcccctgcatcaggatgctgtcgatcagatcgtcaaccttggatgtatcataaaaatttttgtcgttggcaaagatcttgcgcgtggggatcatctgcagcctgcgctcggccggcttggcagcgccctctggcggcttaatgtagtcagcgaggttaaaattactcatcgtctgccgcctccttgcccaggtactcgtccacaaagtcgcggtagtcgcgggcggccgcgcaccaccggctgtatgtactgatcggctgtcgcgcaaaggttgcctcgtccatcttgtctgtgcggcggatcgtagtctcaaacaccggcacatccatggcgcgcaggtactgctcgccctgcgtcacgaccggggcgttgtgccacatcgtcaccagcacgccggcgatccgtatgctgctgcgcaccgtctgcacggcgcggatctgcgccgtcagctcgtcgatgccggagatggcaaaggcgtcgaccttggccgggatgatgatgtcatcgctgacggagatgcccgcgatcgacaccgccgtaaagcccggcgggcagtcaatgaggacgtagtcatagtcggactccgcaaactccgatgccataaagtccccaaagccggagaccagcgacttatccgcggttgccgccgcgacgtcgagctgcagcaggtccatgctggccgggatgatgtccacgccgtcaacctgcgtcatccagcagcactcatcccacgcgctctggcgcgtgaaaacgtcgtacagcgtcaccggcgcgtggtcgccgccgaaaaagcgggtcgcgttggcctgcgggtctgcgtcgatcagcagcacgctcttgccgtgctccgtggccaagatgctggccatgttgatggccgtggcggttttgccgacgccgcccttgagattcacaatgctgataactttcatttttttgcacctttcttttttcgcgtctcgcccggcagtctcggctgccggtccttgcgcggcagcgtgtcgtcacccgcgcggtccgggaaatagtagctctcgcggcacttgcgaccgcggggcagatcaaactccacggtgtaaaatcgccgctgtggatggatgtacaccacggtcgccgtaaaggcttgcccgtccgatacaaagccagagcacgtcgacccataggacggcaccatgccgggcagcttgtcgccgatctttatggcagctcgcctcccctctccgcggtgcgcggccatgcctgcatccgcggccagtcgtcctcgtcgtcgtggtccgcggccgtgtccgatttggacaccgccggcagcatacgcagatgcgccgcgtcaaagacaagctcgatcgcgccgcgctcgccctctttgtttttgacgatcgacagcacccggtcgccgccgggctgcgccgcgaggatcatgatggcatccgcgtcctgctccagctggccggactcgcgcaggtccgacatcgacggtgtgcggctgcgctgctgccctttttccgggcgcgacagctgcgacagcgcgatgacggcgatgccggcccgctgcgccatcgtgtgcagcgccagcgagatgttggtcacctgctcgacgcgggtgttgccctttgcctgcagcagctgcacgtagtcgatgacgatcacgtcgtaccgccgcgccatggcgaccgcctgcacatcggcaacgccaaagccggaggcccggatgacgtccagcgtgatgcgctgcgcggtctggattgccgtcgaagccgtcttgtagtcgtctagcaccatctggttgcgcttgatgcggccgaagttgatgccctccgtctgcgcgaccatgcggtcgtacagcttggcgtccgacgtctctaggctaaaaatcccgacccggagaccggagcgcgccatgtgcatcgcaaactgcgtcgccagcagcgtcttgccgctgctcggcaggccgccgaggatgatcaggtcgccgcgctctgcgtagagcctctcgtccagctgccggataccccagcggagatagtccggctgatgcccatcggcgtggcgctggtaaaactcgcacagcccctgatgccagctgacgacgcgcagcgtcttgctgtcgcacaggcactcgcttgccgtttcgacggccgcgcgcgcctcgtccagcgtcaccgcgtcgagcatcttggctgccgcgtccttgatgcgcgcaagccttgcctgctcgcgcatcacgtcggcatacgcctcccagtgcgccgccgtcggtgtgtcggccatgatctgcaccagcatctgccgatatgcatcgcccaggcggtgcagcaccgtgaccacgtcgaccgtctggcacgcggaccactgcgcgcggatggcatcgtacacgtgccggtactccggcgtcaaaaagtcatccgccgatacgcgcagcatcacgtcgccgacgatctccggcgagatcagcacactgccgatcacggctgcctgcgcatcgatcagtgtctgctttacgtccatagcggcagacctcctccctccgccggttgctctgccggcgcgtgtggctcgtcctcccagcggcgctgattgaggtatgtagccgcatacgggatgccgacaccccgctgccactcctcactggccatctgccgcttgagcgctctggcgatgtcgtcgatcagtgcatcgtccggctttagcttgtcccatgcggccgcggcagcccttggcttctcgccccgcgggtagtacttccaaaacgccgcaaagcgttccggcttccacgccggctcgcgcccttgttcttttttcggcgctcgccgccccctctggggggtaaagggggtattagtatctaagtacttggtatctttagtacttggttgcgttggattttccgttgacgggttatccgtcgacgggtttcccgacgacggtgacaccgttgtgggattatccgacgacggtggcgcatctgcgccaagcggcgcctcgtgcacgatgtactcgttgcccgcaaaagatccgtccgccgcgtgcgtctggcggcgctcgatgtagcccgcctgctccagctccacgatcgcggaccggatggcgtccttgccctccttgcagatgtgggcgaggccctcgagcgtatagtcccagtcgtccggcagacgcaggatcttgctcagtaggccgatcgccttgaggctcaggcgggtgtcgtcaagatggcggttgctcatgacagtgtaattcgtcgacttttcgacgcgcatcacggccatctcaaaatccccccttgcaatcgttttggatctgctgtaaaatgtaagtgcaatagctattgcacttttttgcacctgagtcgtgcccgtcgccgcgggcacggctctttttttgtcccatcatcatactcacaccaccctcatgccagggtaatactccggcaccacgtttttgatcggccggccgcgcttgcgtttttccggctgcggcttctggcgcggctgcggtgcgcagacggctgccggcgccgctgcgatgcggcagcgctcgacgtatgcatctacgtccgactgatagtagcgcagcgacttgcccagcttgtagcacggcagctcgccgtccgtcaccagccgcccaacggacgaccgcgagattgacagctgctcgcacacatctttagtcgtcagcatggccatcctcgtcccctcctctcgcatacttgagctgcatggcagcctggacgatcccgtcgagctcgcgcgtaatctgctcgaaatccggtcgctcatcctggtcgatgcggccatcctcggcaatgtccacgaggcggtcgatgcggtgcgagctgtcaaagtcgcggatccggcgcagcagctggatcacggcctgcggcagggcgatggtgtccacctgtggcagcaggtcggccgcgacgcggctcttgttgagcagatgccagtagccgagcaccggcgcgccggacacctcgaccatccgcgtcgcaacatcgtctgacggcatcccgcggccggactcgtacaggcgcacgctctcgacggagatgtccagcgcctccgcccagcgctcctgcgtcatgccggcaatgcgtctaccggtttggctgatattgtggtagttgtgctgcatggtgttttgtcacatcctttggtagcatgatgatagccggtcaggccggcacgttatacaggtcgtcgatcgtgcagctcagcgctgccgcgattgctgggagcatatcggcgcgtgggtatgacccgctggtctcccacatcgcgaccgtgctttgccctacatgcagcgccgacgcgagctccgcctgcgtcaaaccgcgtttcgcgcggcaaattttgatgccgtccaaggtatcacctccgcttatcaattatcttgattgcgtttactatcttatatcaagtatgttgatatgtcaatatattttttcaattatcttgatattgcgtttacttttcgatttttatcaattatcttgatatcaacggagttgataaaaatgaacagaattaaggagttgcgcaagcgcgacaatgtcaaacaagcagacctcgccaagtcagtcaatgtcagtcaggccgccctgtctgggtacgagacaggcaaatacgaggcggataccgacacatatcggcgcattgcgaattattttgatgtgtcacttgactacttgctcggcgggcagccagcaaccccagcgcgccccggctacatccgcgtcccggtcctcggccgcgtggcagctggcatccccatcgacgcgatcgaggaggtcatcgactgggaggacatcagcgctgaagccgccggagacggtgagtactttggcctgcagatcaagggccacagcatggagcccaagatctcggacggcgacgtcgtgatcgtccgtcgccagccggacgtggacagcggcgacatcgccgtcgtgctggtaaacggcgacgatgcaaccgtcaagcgcataaaaaagagcccgcagggcgtgacgctgatacccagcaatccggcctacgagcctatgtattacagtaacgaggagattgagagcttgcccgtgcagatcctcggccgtgtggtcgagctgcgggccaagttgtgacgtgtccaatttggacacagggagctacatatgagctgcgattttttggccattgatttcgagacagccaatgcgagccgcgggagtgcctgctctgtcggcattgcggccgtgtccggtctgcgcatcgttgatacatattactcgctcatcaagccgcgtgtggccggttttgactcttacaatatctcggtacacggtatcacagacgaggatgtcgcaaacgccaaaacgctggacgagctatggcaggagatctcctgcatgttctcgccgcacacgccggtttttgcgcataatgctcactttgacatgacggtactgttgcagtcgctgagccatgagataccagactttatttacgccgacactctggacgtcgcgcactctcttggcatcgccaaggcgaagctggacaactgcacggacgcgctgcacatccagctcgaacagcatcacaacgcgctggacgacgcgcaggcgtgcgcaatgattgccataaccggtatccagcgcagcggctgtctgtctgcgtgggaatacctcgcaacatcgcccgacgtagacatctaccattacgccgatgttgtcccggctcgtgaaccggtgcacaggtctgcacatcaacaggggcacagtaagacatacccgcacgcgccgcggccgtgtgacattgctccgacagtcgacacgatcgatcagcgcggctgtctatacggcaaaaacattgtgtttaccggcgagctcagcatcgaccgcggcgaggcgatgcagatagccataaactgcggcgcgacggtcaaaacgtccgtgtccaaaaaagtgcattatctcgtcctcggcgagcaggacccggatgccgtcggcgcaagcgggcacagcacaaaggagctcaaggcatatgagctcaacagcagcgggcaggcgcagatacaaatcatcaatgagtgcgagtttttggagctcgcgggtttgggggcaaaagtataatggagcagatcactctggatatgttggatgagatgtcggcggaaacggcagcgtacaagctgatagagccggcgctcctcgagacgatgcgcaacgcgacaacacctgaagatatgctcatttttaaggcggacggcgcgcagtacagctccctatacctcgggagcgagaacagcctcgtatgccgcatcagcatccgcggcaaaaaaagtcatgtgacaatcccggtcaaatacgagcatatgatccccgcgaatgtcagcacatcacacctcaggtcggatccgtattatgtgcgtctgcctcttgcagatgctgagtcgattgtcagctacgcgccgttgctctccgcgatcctcgacgatatgattgatgcgctgccaactgatttcggctgctgctcgcgctatgaggcgtgcagcgacgctggtaagtgcataaatccggatcaggagctatccacacactgctactacaagcgcaacctgcgtcatggcaaaatcttttacggccgcaacaaaaatgcatagtgtccaaattggacacataacaaaatagccgcccggtgctggcacaccggacggctgacacagaaaacccaacccaagcaataaagggggtagtctgccctgttatcttatcacgcccatgccgggcgcgcaagatgcaaggcgcatttgctatgcaaaaatatctcaagaaaaagatcagggacgagcgcggtgtctatatcgccgtgtacgccaaggacccggaggagctggagcgcaaggtcgccgagcgcctggtcgaggtcgagcgccgcaaggcgctggcagccaatcccatggtgtggcagtatgcgcagacgtggtacaagctctatacggcgcacctcagcgacagccgcaagtccgactatgctatcgccatcaatcgccacatctgcccgattatcggcgcgcggcacatactggaggtctccgaggacgacatcgcagaggtaatgcgcgcctgcggcgccctgtcgcgcagctcgcaggataagatcgtctgcgcgctcaaaaagatctttgaagcgggcgagcgcgcgggcgtcgtgcggcataacccgtgcgccggactgcgcgccggcggcaaaaaatcggccgaaaaagaggcgctgtcccgtcagcagatgcagacgctggaggacgccgtcgcgggcacacgcatctatccgtttgtgatgattggcctgtacgccggtctgcgccgcgaggagatcctcggcctggagtgggactgcgtccatctcgacggcgctgcgccgtatatctccgtgcgccgcgcgctgcgctgggtgcacaatcaaccggtcgtctcggacgagctcaagagcgcggccgcccggcgcgacgtgccaatcccgcccaagctcgtcggctgcctcgccgacctgcagcgcaccgcgaccggcgactatgtcatcagcagcagcgacggccagccgtggagcatgacggcgtaccgcaacgcctggcgctacatcacgcgccgccagaccggcacggccaagcgcacggagcacggtgagaccgtgctccgtgagaaaaagctcggcgagatggtgcgcaactccaaggtgcagatcacgatcgactttgacgtcacgccgcacatcctacggcacacatacatcaccaacctgatcctgtccggcgccaatgtcaaggtcgtgcagtacctggccgggcactccaaggtggagaccacgctcaacatttacacgcacctcattgagcgcagcccggaggccaacctcggcaccgtgctgcaggcctttccggcagccgaaaaaatatccccaaaagtatccccaaacgccccggcagacgcccaatagccgcgtttttagcccgtcgcaacgggcagtatgacgcagtgcggacatgctgcaaaacgcaaaaaatcccgcaatctcaacagattgcgggattcttcgtggtggacgatacaggactcgaacctgtgaccctccgcacgtcaagcggatgctcataccagctgagctaatcgtccgtgtcagcgttggttattctaacgcatctgcatccttttgtcaaccccttttttcgacggccccgattattttcggagccgtcgaacatggggcgctttacttcgccgtgatatagaccgtgcagtcggccttcacgccgccgcactcggccgtgatcgtcgtcgtgcctttgcccacgccggtcacgacgcccttgtcgctgacggtggcaatggattcgtccttactcgaccacgtgacagtctgattgccgccggccggatagatcgtcgtgctcagcggcacctcatcgccgaccttggccgcgaactccgtgcgcttgctgccgaggaacgtgatggtgatgctcgtgaccgacggagtcggcgtcggagtcggggtcggctccggtgtgggtgtcggcgtggcgaccggcgcggcactggaaaccgtcgccggcggggtcggctcggcaacgctcggggtattttgactggcgttcaggctcacggtgatgagcacgatgacggcagccacgaccgcgaggagcaaaatgccgccgaacagcatctgccacttcgtattgaccgcagcgtgctccgccgccggcgtgcccgcattttcactggacgtgcgcagcggtatgcgctctgcggatttgctgcgtcccgtaccgcaatatggacagcggctgcgcaggccggaatactcgcgcccgcagcgccggcaggtgatcttgggaatgacgctcatgagaagcctccaatatgtaaagatttgatacgcatttgttttccctatcatacactgttcggtttttttcgtcaagagggagagcctgccgctcccccctcttgcgcggcgcatcaaaactgcatctgcaccccgccggacacgtccgatgtctggatgcgttcctgctgcccggtgcgggcattgacggcgatgacgcagcgctgcccatcgtccgtttcgcacaggtactcatagcacagcgtctcccgcgcgccgtagagccggagaaatgccgtgcgcgtgtccacgacctgcagcgcgccgggcacggccgcctgtcccgcttccgcgccgatcgtatcggccgagagcgtgcgcgcccggtgcgtgtccagatacgatgccgacgagaagccgcagaccgtcccgtcgtcgagccggacgcgcacgcgcagctgatccgccgtgcacagaacaccgtcctgcacatagcagaacgtgcagatgagtgactgccccgcgtcctccgtgtcgatcaggcgcatgccgtcatagccgcgcgcgcgcaaaaacgccgcggccgcttctgccgcctcatcggtcgaaagcaccggttcgccgccggcacaggaggagtaatagcgcagcacttccccgccggagaccgtgaccgcgatataggacgtatcgtccccgccgtcgatgtcaaagttccagcacggtacggcgccctccgagcggccggtcgcctgcaggcgcgccgcatccagatccagaaaggccgcggccgcagcctgcgcctgctcctccgtgacctcgtcgtggcccgccagcatggcatagtccgccgccgtgcgcacctgatagctgccgtccgcgatcgggagcggcagctcctcaaacgaatcggccagcgccgcaagctccgcctcgagcgtatcggacaggtccgcctccgatcccaggttttccagtgactccgtgctgcgcacgtgcgccgtcgtcgtgaccgcgccgtcataaagcgactggccaagcgccgcgagctgtgtgctcagctgctttgttgcatcggaaaaggcgcgcagatgctccagctcctcggatgtgaacgttctgccctccgccgcattgcgcgagagcgtgcgcgcgtagtccccggcaagggcgatgttgcgcgcgatgcgcgcgagcgcatgcgaattgaccggcagcacaccaagcgccatctccgccgtctgcgcattgctatagatatccgtgcagaccgtgcactccatggccgccgtcgttgcatacaggctcttttgcagcgagctgtcgagctcctgcacggcgttgagcacctcgccgtaagcgtggcggtagttggcatccatggccgtctggcggcggttggcatccgtgcggcaggcgatcaggccgaccgcaagcgccgcgacgagcgccgccgtgtaggaaatgatgagcacgcgcgtttttttcttcatagcaaaacaccccttccggactagtgttgccggaaagggtggttttgatgtgcaatttttctcagtcggcgatctgcagcgtctgcgccgaggcaagcaggctctcataccagcccgccggcgccgttcccgcccggcagagcacgaccgaaatgcagccacacgccgtcgggatcaggtatgcctcgagctgcctttgcaccgtggcgccgttgacgccgtaggcattcagatctccaagcttgacctgaccgagcgactccgtcgttgcgatcgtgccgtagtcattgagaatcgtacccgcaagcgtctgtgcgtccgcgcccgggtgataaccgatctccagataggcgtccatgctcgcatcatccgcgcgggcaaagcagcacttgccgtccatttccgtgctcagaaacacggaagtatccagatacagcgagaaatccgggccgccacgctgggcaaacgagccggtcacgagctgcatagtcttatcctcgccgccgacggaaactgcctgctgggcgtcccgcgacggggtctgtccactgccaaggatcagctccggctcgtcggaaaacggaaactgcggcagatttgtcgcggccggtgcctccggtgcagacttgtggatgcggatgccggctgcgttgaccacgatcagcgcgatcgcaagcagcacgaccacgacggccatgacgatgaccgcccgctccacgcccgtgcgttttttcatgccgctcacccttccagtttggcgatgccggcgtcgatccggcgcagggtctcgtcccggccgaggatgcggcagatctccaccgcgccgccgggcgtcaccgcgcggccggacaccgcaatgcgcaccggccacattaccttcgcgttttttacttccagccgctcggccagatccttcatggccgcaagcagcgtctcatcatcccacgccgggagctcggcgagcagcgggcgcaccgttttgagcatctcgagcgagacggcggggtcggtcttggacttcttattggtatagagcgtgatgtcatactccggcagcgcgtcgaagaaatccaccttctccggaatgtccgtaagcacctcgcagcgctgctgcagcagcggcgcgatctgcgcggggtcgatggtggggtttttcaccgtctggcggatatagggcgcggccacggcggcgaactgctccggcgtcatggcgcggatatacgcgctgttgaagtacttgagcttgtcgatatcgaagatggccggagacttggagatgcccttgatgtcgaacgcctccacgagctcgggcagcgaatagatctcccgctcgccgccgggcgcccagccgagcagtgccacatagttgaccacggcctccgacaggtagccctgcgcgatcagatcctcatacgacgggtcgccgtggcgcttggacatcttgttgtgctggtcgcgcatgaccggcgagcagtggatatacttcgggatctcccagccgaagccctcatagagcaggttatatttcggcgtggacgacaggtactccgacccgcgcacaacgtgcgtgatgcccatgagatggtcgtcgatgacgttggcaaagttatacgtcggcagaccgtcgcgcttgatgagcacctgatcgtcgagcgtgtcgttatcgaccgtgatgtcgccgaagatctcatcatggaacgtggtcttgccctcgcgcgggatcttctgacggatgacatagggcttgccggccgcgagattggccgcgatctcttcctcgctcaggcgcgagcagcggccgtcatatttgtggatgaccgcgccgtcggaaacattttcttcggcggcatcgtccttatcgcagaaacagcggtaggcgtggccgcgcgcgatgagcagctcggcatattctttatagagtccccgccgctcggtctggacatacgggccgaccgggccgccgacatccgggccttcgtcatgcgtcaggccgcaggcgcgcatggtgctgtaaatgacatcgaccgcgccctcgacatagcgtccctgatcggtgtcctcaatgcgcaggatgaacttaccgccggcgtgccgcgcgatcaggtacgtatacagcgccgtgcgcagattgccgacgtgcatatagcccgtcgggctcggtgcaaagcgggtgcgcacctcgccgtgcgggatgcgctgctccatgtcttcaaaccacttttgatctttcatattctctgtatcctccggatagataaaccataattatttatatcttattttacatcgcatggattgtcaaggaactttctgtgttgtattccaccacaggttgtggtacaatattcgaacaaatacgaattttcagcacaacagttaaggaagtaatcaaaatggaagaaaaaacagcaaaaaaagtgatgctctccggcatccagccctccggtgatctgacgctcgggtcttatttgggcgcgatcaaaaactggagcgagcgcgccgagatctttgactgctattatttcatggccgacctgcactcgatcaccgtgcggcagaaccccgccgacctgcgccgccgcaccatcgagcagctcgcgcaatacatcgcctgcggtctcgacccggaaaagaacacgctcttcatccagagccatgtgcccgcgcacacccagctcggctgggtgctcaactgctacaccatgttcggcgagctctcgcgtatgacgcagttcaaggacaagagcgccaaaaacgccgagaatatcaacggcggcctgttcacctaccccgccctgatggcggcggacattctgctctatcagccggactacgttcccgtcggcagcgaccagaagcagcacgtcgagctctgccgcgacgtggccacccgcttcaacaacatctacggcgacgtgttcaagatccccgagccgtacattccgaagatcggcgcgcgcgtcatgagtctcgtctcgccggaaaacaaaatgtccaaatctgacaaagaccccaacggtaccgtgtacctgctcgaccgtccggaggatatcatgcgcaagttcaaaaaggccgtcacggactccgacaccgagcgctgcgtgcgctatgacctggcgaacaagcccggcgtgtccaacctcatgagcatctactccgcctgcaccggcaagaccttcgaggagatcgaggcggaatttgacggcaagggctacggcgcgttcaagcccgccgtcggcgaggcagtcgtcgagacgctgcgccccatccgcgaggagagcgagcgtctgctcaaggacaaggcctacctcgagagcgtctacaaggccggcgcggaaaaggcgtcctacattgccaacaaaacgctgcgcaaagtctataagaaggtcggcttcgtcgccaaataatacttacattattggagatcggttctcatgtttcttaacactgctgtctggatcaaagtcatgctagcgatcctcatcgcgttcgtggtcagctttgcgctgacgccggtcgtcaagatcctggcgcaaaaagttggcgccatggatgtaccgggcgaggcccggcgcgtgcacgatcaccccatcccccgcatgggcggtctggccatctttctgggcttcatcgtgtcgatgctcctgttcgtggacatcacgcaggaggtgcgcggcattctgctcgggtcgatcatcatcgtcatcaccggcgtgatcgacgacatcatctccctgcgtgcgtggacgaagtttctgatccagatcctctccgccgtcatcgccgtgctgcacggcgtggtcatcaacgtcgtgtcgaacccgaacgtgttcagcagtcaggaggccatcgtccttggatggctcgccattccgctgaccgtgctgtggatcgtcggcatcacgaactccgtcaacctgatcgacgggctggacggtctggccgtcggcgtgtcgaccatcagctgcgtgaccattctggtcgtggcgctgctcgtgtcggagccgaacgtggcgctcatcgtcgcggcactcgccggcgcgtgcatcggcttcatgccctacaacctcaaccccgcccgcattttcatgggcgacaccggttccctgctgctcggctacgtgctggcaacggtgtcggtgctcggattgttcaagttctacgcgatcgtcacgtttgtcgtgccggtgctcgcgctggccgtgccgctatcggacacgctcttcgcgttctgccgccgcatcctgcacggacagagcccgtttcacgccgaccgcggtcacttccaccacaagctcatggatctcggtctgaaccagaagcaggccgtcgcgatcctctacgccatcagcgccacgctcggcctcgccgccgtcgtgctcacgacgaagggctccatccgcatcgcactgctcgtcctcgcgctgctgatcggctttgtcgtgtgcgccttcatccgcaagagcgtgcacaagcaccacattgacgtggagctgcaggaggcgcaggaagcggccgaagcagccgaagcagccgaagcagccgaacaggcaaacaacgccgatgccgccgaagcacctgcacaggaggtcaacgatgagcaaacgcattaaagtcatgtccgttttcggcacgcggccggaagcgatcaaaatggcgccgctcgtgctggagctgcaaaagcatcccgagatcgagagcatcgtgtgcattacggcgcagcaccgggaaatgctcgactccgtcatggactgtttcggcattcgtgccgactacgatctcaacatcatgcagcaggggcaggatctgaccgcgatcacaacgcgcgtgcttgagcggatgcgcgaagtgctcggtgaggtgcagccggacatcgtgcttgtccacggcgacaccacgacgacgtttgccggcgcgctcgccgcgttttacgccaagatccccgtcggccatgtcgaggccggtctgcgcacgtacgaccgctggtctcccttcccggaggagatgaaccgctcgctcgtcggccgcattgccacgctgcacttcgcaccgaccgcaaacaacgcccacaacctcgagcgcgaggccgtggagggcgacattttcgtcaccggcaacaccgtgatcgacgccatggcctacaccgtccgcggggagcagttcgtctcggacgaactgcggcaggtcgatttttcgcgccgggtcatcgccatgacctgccatcggcgcgagaactacggccagcccatgcgcaacatcttcaccgccgtgcgccgcctggcgctcaactatccggatgtcgagatcgtctatcccgtgcacctgagcccggtcgtgcgcagcacggcggaggagctgctcggcggcgtgccgaacatccggctcatcgcgccgcttgacgccgtggacatgcaccggctcatcgcgcgcagttacatggtcatgaccgattccggcggcattcaggaggaagcacccgcactcggaaaacccgtgctcgtgctccggcgcgagacggagcggccggaggccgtcactgccggcaccgtcaagctcgccggcacggacacggaggagatctaccgtctggctgccgagctgctggacgatccggccgcctatgaccggatggccaaggccgtcaacccctatggcgacgggcgggcctgcccgcgcatcgcgcaggcgatcctgagccattttctcggcgcacagccgcccgagccgtttgtgcccgcgcactaaagaaacagcatcccgccgaggatgaacagcagctccttgtcgccgctctcgcggtacatgaggtataacaccaggatcagcagcagatcctcgctttcgaggtctgcgagcgaaaatttctgcagcaactgctgcaagccgccgccgggcaagcccggcggcggcttgttgtttccggcaggcggcgcgggcgggcgcggacggatagacggctgcggcgcatccggcacgcgctcgacccggccgctgttgccctgatagcgattatacatggtcgtccccctccaagtcctcggcggcaagctcggcaagcgacgcaagccgcgcgagcttcatggcgcggtcgatcttgcgccggcgcttctcagccagatagggcttcatggcctcgagcaggtggcggttggcggagtcgtgcccgccgccgcgcagcgccgacatcatccggcgcagctgccccatatcgacgtcgagctccggctccggcgcggacggcggcgcttgcttgccgccgccgtcgcccaggattgaggatgccaactgcgcgatcttgccgaactgcttcggatcattgagcagcgcgtcgagcttctccccgatctcatccatcctgcatcgcgtcctttacttttccggccagacgctgcccggtgtccgtgctgagcacctgcgtgaggatctgccgcagcgtctcggtgtcccccgcgcgcgccgcctgctcgatcttctgcgcatcgagcgcaccggccagcttctgcccgtcggtcgagtcggcgatctcctgcaggcgctgcaggcgtccgtcgcgcgcgagctggtttttcagcgcatccaagtccttcatatcggtcacgctccattcggggcggcttgactttgcaggccgtgtcccgtataatgcggatggcccggccgtgccgggtatcctgcttttattgtattctatgagcaatgcagaggtgacttgccacgaagatccttgttttttccgattctcacggccggacgctcggcatggtgcgcgccatccggcagcagcagccggacgccgtgttccatctcggcgactgcgagcgcgatacacagcggctggaaaaagagtttccggacctgccgctgtaccgcgtgtgcggcaactgcgaccgcgagccggtcaaccccgaggtgctgcagctcacgctcgacggcgtgaagttcttcctcacgcacggacaccgatacagcgtgaagtatacgctcgacgccctgctcaatgccgcctattttgcgggcgcggatatggtgctcttcgggcacacgcaccgtgccatgagcgagaccatgcaggggctgtacgtcgtcaaccccggcacggcgggcgttggagcgctctgcacgtacgcctgcatcgagacggaaaacggcgcgatccgtaccgtcggcatccacgccattccggaagcataaagcataaaatatacgcccccggcagtcgccgggggcgcattctgtgccgtgtttacttttcgcggaacgtcacgtagagcgtgtggttgctgtccacgttcatgaaggaatagctcgtcaggggcaagactgtggtgccgtcgatgaccagcgttgcgacctcgtagccgtccttcggcgtgatcgtaaatgacacgctgccgccctcggccaccttctgattgccgctcgggctgacgctgccgcccgcgccgcacgtaacggtgacggtgtgctccttcttctcctggccggccgagatggagacctggatcgtcgtgcccggcttgaccatcgtgccgccgaccgggttctggcgtgcaacggagcccttgcgcacgttgtcgtcatagaccgtgccgctctcctcgatggtgacgccgaggctcttggccgtcgcctgcgcctgctcgagcgtcaggccgacgaagctcggaatggcgaccggggtgtcctccggcgccgtgggctgctccttcgggccgagcgagacaacgaacgcgaccgtctgccggtgcttgagctgcgtgccctcattgacgtcctgccggatgacgatgcccttggtctcgtcgctgttttcataggtaatgctcggctcggcgtccaactccgcaagctgcgccttggctgattcctccgtctggccgacgaggttcggcaggatgcgctcattgcctttatgaaaattgaacacgccggacagcgcgcaaatcacgaccgtgaccagggcgagcaccgccgagatcgccgtgatcgtcagccgtttgcgctcgctcatgcgccggacgccgtgacggcggcgtgtggttgtctgtctgctcatattttttcctccgggatcgacaggatggatagcaatttcaaagaaacaagtatataataacatagacgcagcgttttgacaaatgttcgtttctgggaggatcttgacatgaaaaaaatcgcactcgtgaccggagcgtcccgcggcatcggcaaggcgaccgcgctggcgctggcccgcgacggctggacggtacacgtgaactatattcaatcccgcgcggccgccgaggcggtcgccgcgcagaccggcggcatggccatctgcgccgatgtgagcgacggacaggctgtcgaagccatgttcgagaaaattggacctgtggacctgctggtgaacaacgccggcgtcgcggtctacgggctgctgacggatctcgacccggccgtctggcagcggctgtttgacgtgaatgtcacgggtatgtataactgctgccgctgcgcgatcccgccgatggtgcatgaaaaggccggacacatcatcaacctcgcctccatcctcggcacgaacggcgcctcgtgcgaggtggcctactcggccacgaagggcgcggtcgtcgcgttcacgaaggcgctggcaaaggagctcggcccgtccggcatccgcgtcaactgcgtcgcccccggctgcatcgacacggacatgatcgcaaacctcagccccgaggacaaggcggagctggccgacagcaccgccctgtgccgcatgggcacggcagaagatgtgggcgatgcgatcgcgctgctggcaagcgagcgcgcccgcttcgtgaccggacaggtgttcggcgtggacggcggactgctgatctgaaccagacagcgcaaaaaaacaggtgcataccggatcggtatgcacctgttttggcttttattccgccgccggcgtgctgggcgctgcattgccgggcgtcgtggacttgttgcggccgcgcccgccgcgatggcggcggcgatggccgtcggcgcgtttttcgccgttcggcgccgcgccctcggccggcttgggcggctgcgccttggcgcggctgcgctcggcgttctcgcccgctggcttgtcccccggcttgcgcgcgccggatttgcggttgggctgagacttctgccgcggctgacccttggactttgcaccctcctgcgccgccttcggcgcagcctgagcgtccgcgagcttcttgccgccgtggccgcgtgagcggcggcgcgggcgttttttcttctcgccggattctggcgtgcgtgcacgctccggcttcttgtcgccgtagacctcgtcggcaaaaagctgcggcagcgcccagggatcctctttcggctcctcttcgcgcaccggcttcggccggtccttgagcagggacggcagcggctcgcccggcttcgggcggccgccggggatcacggcgatctcgtcagcctgatagtttttgaaaacgtcctcaccctgaccgtcgagcttgaccttcaggctgctgcgcaggatgttcacggacgacacggtcccgtagcccgcgggcgtctcgacaaaggcaccgaccttcggcacggccttgaccagctcctcatacgccgcctgctcatagcgcaggcagcacatcagacggccgcacgcgccggagatcttcgacgggttgagcgacatggactgcaccttcgccatcttcgtggacacgggctgaaagtcgtccagaaactgactgcagcagtacgggcggccgcagatgccgatgccgccgagcatcttcgcctcgtcgcgcacgccgatctggcgcagctcgatgcggttgcggaacacggaggccagatccttgaccagctcgcggaaatccacacgcccatcggacgtgaagaaaaacatggtcttgttgccctcgaagctgcactccacatcgacgagcttcatgtccaggccgtgctcggcgatcttctgcttgcagatggcaaacgcctctttttcgcggcggcggttgatctcctcaatgcgcagatcgtctttcgtggcgatgcgcgccagtgagcgcagcggctgcacgaccgtctcgtccggcaccgcatgactgccctgcacgcactcggccagctccagcccgcgcgacgtctcaacgaccactttctcgcccgtgcgcacggcaatgccatgcgggtcaaagaaatagaccttgccgcggtttttgaatttcacactgattacttctgtcaatttgatatcctcacttctgaactttcgcctgcacgcccgaaacggacagcaggccaaagatatgcttcgtgccgacattggcgcggcggtaattctcgcaggtctccatgagccgcagctgctgcgcgcacagtgcctgcggcagcaccgtctcatccggctccgccagcaagtgcaccagccggtgctgcacggcgggaagaaacgccgagagcgtctgcgcatccatgccctcctgggcaagacaccagcgcaggagcgtcagccgatcctgcgacgcgaccgcgcgcagatagtcctccgccagggtgcggatctcgtccgattcctgcagctgctccgtcgggtcgcgcagcagtgcgcagcgcgagcgcaccgtcggcagcagcagctccgggctcgcggccgcaaggatgaacgccgcgctctgcggcggctcctccagcagcttcaaaaacgcattctgcgcgctgaggttcatcgtgtccgcctgacgcagaacatagaccttcttttccgcctcgctcggcagaatgtacgccgtggccgcgatgctgcggatctggtcgaccttgatcgtcggcactttggcgtccggatccggcgcgacatagatcacgtccgggtgcacgccgtcatagaccttgcggcagtcccggcacgtccggcacggacgcacgccgtcactgcggcagagcatggccgccgccagatcgagtgagagccggtcgcgcgcctgctccgactgggacgcgacaatatacgaatgcatcaggtgctcctgcggttgaaattgcagcatacgcgcgctcctttccggcatacattgtttattttacccgctgcggccggattcgtcaatcactattgcatttccagaaataaaaaaagcaggcagcaccggctgcctgcttctcttacgtaagatctcaagcgttcttctcgaggtaatccacgacctgacggacggtggtcagctcggccgctttctcgtcctcgatcgtgatgccgaacgcatcctcgatcgacatgaccagctccacgacgtcgagcgaatccgcaccgagatcatccgcgatgttggtgtccatggtgatggtgttttcgtccacttcaaactgatgggcgagcagttgtctcacttgttcgaacataataccgtttcctcctaagtctctcgtcagctccactcacggctgaccggtttgttgctggtacgctgcggcttctcgtaggagaccacaacgcggcggttcggctcggtaccggtcgaactcgtcgtcacgccttcgtaatcctgcagcgccgtgtggatgacgtggcgctcgtaggaattcatcggctcaagcgccatgctgcgcttgtacttgatcgccttggcggccattttctccgccagacgcacaagcgactcctctcgcttggcgcggtagctctcggcgtcgacactgatgtgcatgtgcttatcgctgccgcggttgacggcataattggtcaggtgctggatcgcgtcgagcgtctcgccgcggcggccgatgaccgcacccatgttgctgccggacaggttcacgttcacgccgccattttcacgcgcggtgatctcgatctccgcctggatgcccatgtgctcgagcaggccgctgacaaatgcgcggatgcgcgcatagctctccggctcgtccgctgccgctgcgggagcggcaggtgcggccgcaggctgctcctgtgcggtcggagccgcagccggagcttccgcaacggtctcgggctcctcatccggcgcctcatactgcacgcggatgaccgcgggactggcgccgatgccgaggaaaccagacttggcgcgctccacgatctcaacggaaacatcatcccggtcaaggccaagctcctcgagcgcggcggcgatcgccgcctcttccgtcttgccggacttttccagtgttttcaacatcattcagtactctcctgttttccttcgggggcttcggcggccagcgtctgctccgcttcggaagcggcggcctgcccctctgcataatggtcccgcgcataggcacggccgcgcgcatagcggcggttgccgacctgggactccggcgcagccgcctgctcgacgccgagacgctcgcggcgggcagcacgctcctcgcgcatcgctgcggccttgcgctcgtcatccttctgcttctggctggcctggatcttcttcttgctggtgttggggttgacgacggtctcgccggcagccttcaagcgctcggtctcgagacgcttgcgctcaagctctgcgtcgcgctctttttcgcgcgcgatccgctcggcatcgagcttgtcgagctgcttgttgaaaaccttcgttaggctgacatcacgcaggatgccaaggatgctgttaacaatccagtaaatgcccagagcggccggcatcgtgtagcagatccacagcgacacgagcggcatcatgatcatcatggtcttgttggtcgtagcggcctgctgctgattggcagcgggctgcggcgtcatcgacgtgctgatcttcatggacagccacgacagcactgccgagacgatcgggatcaggaacaggcccagagccggaagccagacggctttgttgctccagtcgaaggtccagatcttgaacgacggctgctggcccatgttcaggccgatgaacgaatagtcgatatccagcagtttgcccgagaaatcaccgagcgcgccggtcacggcgtcccagttctgatggatcaggtcggcgatctggatctcctgataggcggactttgtctgcgcgacatagcccgcgttggtcgtgacccagtcggtcagctgcgtgacggcgtccgcgctcaggctcatcatcttcgtcagcggctgacggataacgctgtagagcgcgatcaggatcgggaacgggatcaggctccagaggcagccggacatcgggttgatcttctcttcccgatagagcttggccatctcttcattgagcttttgctggtttccctcgtgccggcgctgaagctctgcgatccgcggctgaaggcggctggtgcgcatcatgctcttcttgctcttggccatgaacggaagcaaaatcaggttcacgacgacgccgaagaggatgaccgcccaaccgtagctgccggtcagctcatagagtgctttgagcagccaggcaaagggtgcagtaatccaggacataagacgactccaattcttaaattcttaggatttcccggtcatggcaccgggtcataaaattcatgctcacccgtatggaacgggtggcaccgacatatgcgcttgatggccagccacgagcccttgagcgctccgtatttctgcagagcctcgagcgcatattccgagcaggtcggaatgaaccggcagcagggcggtttgagcggtgagatatacttgcggtaaaacttcaccagtgcaatgagcagccgcttcatacgccgtcatccccttccgtcagcaggccgagctgggcgcacgccgataagaacgctgcctccagctggtgatagtccgctgtgcgcgcacgcacgcgcgacacgacgaccagatcatacccgcgcgcgatctgccgctcatgcaggcgatagatctcccgcaggcggcggcgaatgcgattgcgcacgacggcatggccgactttgttggacacggtgtagccgatgcggctgcggccggcgcggtttttccggcagtagaccaccagatacgcattggcgcagcttttgcccttcgagtacagacgccggaattcatagttttgtttgatcgtgctggtaaattccaaaggtctcccccgatcctctctgctgtgcagacgctccggaaatgcctttagggcggaaagatcccgccctgaaaaacattatgaagaagtctgcctgctcacgcgcagcaactcagtagctgagatgctttctgcccttcgctctgcggcgggacagcaccttgcggccgttggcggtcgccattctcttgcggaagccgtgctctttcttgcgctgaagcttcttgggctgataggtacggaacatggtgtttttctcctttcgatcatactcaacagcggctcgcgccgccgtagttggcaaaaagtatccggcgccagacgactgacgccggatatacattatacactatgaaaattctctctgtcaaccttcattttttcgccgcggcggcaccgcacagatcctcgccggtgatgtactttttcagcggcttccacagcagtgcgccgatcacgagcacgagcaccatgtcgatgagcatgaagctgccgttatacagcgccgaatagaaccacggcgtcgtcatcgtcaggccgaagaaggtctcgggcatgtactcggcccagaccgtcgcgccgacaacatagtgcacgagaaagcgcgccacgctgccgacgaccgtgccgatgaaaaagccgcccttgagcttcgagcacgcgccggcaaagccgagcaccgtgaacgcgagcagatagtcgccgatgagcgactgccacgtccaggcatacgtgctgctgagcaccgcctgcagaatgctgtaggcaaagctcgcaagcataccggggccgaagccccagcgggcgcagtacagaaagatcggcagcatctcgatcgtgatagacccgccctgcgggagctcggaaagcttgagatagctcaggacctgggccagggcgatgaagatcgcgccctcgcacagcgcacgcaggcgcagatgggatttgctttgggccatgttgtgttcctcctcaaagaaaaaactgcattgccgaaacaatgcagtccatagaaaacgatgataaagtatgatagatttcgtttcctacgccggcattatccggatcaggtctgtgggtatcgagcttcgattcactcgtctcagccgggaatgacccagccccccaatgtacatgatgatttatacacgcatatgtgagatttgtcaagtcacgactgcgcatccgccgcatacagctgcgcggcggcggtgagcatacgctgcatctcctgccgggccgacggcggcgagaggatctccacctcggtgccgaagccgaacagccaggcgtaaaacttggggctcgtgaccacattcagcgtgaccttgaaatgctccggcccatcggcgaccacgatcacgtccttgccgaagcggtcgagcaccgcaccgaccagatggttggcaaagcgcagccgcaccgtctgctcttccccgctgaacatgctgaacactttttgagaatacgccgacaggtcgagctgcgccgcatccgccgcgccctcgcgcggcacctccagcgcggagatatccgtcatcttgtccacgcggtaatgcttgcgcagagcggccttggcatcccacgccagcaaatagtaattttcattgtcccacatcagcgccagcgggctgacgacgtaaaacgcgccctctttccgataccggcgctgcttggagatggtgtattcaaagtagtgaaaacggatctgccgatcccgggaaatggcgtcggagatctcgtcgacattataataaacgctctcgttcatgctcttgacgcggccgtggacatagacctgccgctgcaggagctgcgcatcatagatgctggcaagaccttcgatctttttgataagggccagcgtctttttgtgcgtgatgaatttcgacgactgcacgctgtcgaccagcagcttgagctccggcgtttcgaatgcgcgcgtgccgacatagtatccggtcgtcttggacttggcctgcacgatgtccaggccgaatgtgcgcagcgcctccagatcgccgtaaatactcttgcgttcggccgacacgccgcgctgggccagctgcgcgatcatctccggcacggtcatcgggtggcgctcgtccgtctgctgcagcaggatctccatcaggtacagtaacttcagtttctgattcggtgactttggcatagtgattctccgtttcccgcaaggatcagcataatattaccacaattcagcggtgtaagccagtcaaaagccatcatgatgtacattttttacagcgtttccatttgaccggctgctcaggcgtcgccggcggcagccgctgcctttcgcgctgcagagccgcctgtccgcctattttctccatcatagcaggaagagagtcccataatcaggactctcatcacaaaaactgaaaatatttgaaaaaatgccgggcgcagtgcaaaccaccagttggccgccgcgaacttcatttcccgggagcggcagccgcggtgcgccgggtacgcaggcgggccgagcccacgtcgataagccagacgagcagaacaaatccgaggaagatagcgctgacatcgttccatgcgtactgattcatggcgaaaatgagcggcgcgccgatgccgccggcaccgacaaggccgagcacggacgcctcgcggatgttgacatcgaaccgatagagcacagccgaggaaaacgccgggccgagctgcggcagcaccgcatagcggatgcgcggcagcagagagacgcccatggcgcgcagcgcgtcgtaagcgcgaaaatccagcgactcgatcgcctcggtgaagcgcttgctgagcaggccgatgctgcacaccgcaagcgtcagcacaccggtaaacgcgcccgggccggagacacggatgaaaatcagcccgtagatcagaaacggcacggagcggatcgccacgatcagcacccgaaacagcagcgcgaccgggcgcggcagcagcttcggtgtgctcaaaaacgccagcggcaaagcgagcagcgcgccgaggcccgtaccggccagcgcgatgccgaccgtctcgagcagcagccagccgaggccgtccttgccggtgccgaagaaaaagctccagtccggatgcagcagccccgtgcccatcgccgcgagcacgcttttactcgtgtgcgccagatccggcgcttcgatgcccgccgtgcagacgacgacgcacacgagcaccgccgcccagatcgcgcgctttgccccgcgcgggatgctgcgctcgccgcggatgatgcgcccgagcacgtggctgagccactcgatgcaacagacagtcacgaacaggcacacaaggatcgcaccgacgcggccatactcccgccacgagatcttctcgttgagcagcaggccgatgccgcccgcgccgacatagccgaggatggcgctgtggcgcacattcgtctcgagcaggtagagcgcgttggtcaggtaacccgaggcgatctccggcacgacggcgcgcgcataggcccgcgccggggacgcacccatggcgcacagggcgcgatagggcgcgagcgtcagcgtttcgatgtcctcataggtcatgcgcgtcatgacggccagtgtgaagagcgtgatggcgaccgtgccggagaacgtgccgaggccgaacaggaacgtcgccagcagcgcaagaatcagcgccgggaacgagcgcagcacctgcaccagaaaccgcaggatgcggcgcaccggcgccgggcacggcaggttggccgcgcacagcggcgcgaggatgagcgccagcagcacgcccagcgccgtgccggtgacggacatgcgcagcgtggccagcagcggcgcgacgatcgcggacaggtagctccagtccggcgggaagagctgcgagacaatgtcgcgcaggtgcgcccgccgcgcccagaacaccgcgggatcgcaccccgtgagccagaacgccagcacaaacagcgcgagcacacccagtgcccgcgcccagcgcctgccgcgcgcgcgcgtcatggcgcggcctcgctttccgcgccgccgtagatgcgcgcgaggtcggcatccgtcacggcggcaggcacgctgtcgagcacaatccgcccggcgtgcaggccaaggagccgggtggagaccgcccggctctggtcgagattatgactgttcatgaggatggcgacgccctccgtgcgctgaatatcctgcagcagcgcaaggatctgccggccagtgaccggatcgagcgaggcgaccggctcgtccgccagcagcagcgcgggcctgcgcatgagcgcgcgcgcgatggcgacgcgctgcttctgcccgccggagagatcgcagaccggctcgtcgcacttgtccgccagaccgacgcgcgcgagcagccgctcggcctccgcgatctgtgcgcgcgaaaacaggcccagcagcgccgccggcagcgccatgtccggcaggcaggcattgagcacgttctgccggcaggagaccggctctacgagggcaaagtcctgatagatcgtgccgatgcgcttttgcacggcgcgcttggcgcggccgcgcgcgcgggaaaacggctgcccgtcgatgcacacttccccgccgtcgcacggcagcgtgccgttgaggatgcgaaacagcgtcgtcttcccggcgccggacgggccgatgacggacacgaactcccccggctcgacgccgaaggagacgtccgtcagcacttgcggccggctgccgaagcgcttgctgatgtgtgcagcttccagcagcatgggtttactttccggcggacttgagcatggcctgcgcgtcacgctcgccgtcatagtccgaatccttgccccaggtatagccgacctggctgaagacgctgatgatctccttgccctcgtcggtctgggcgatctcgatgaacgcctcgccgagcgccttgcggaaatcctcgtcggccatgaggtcggagttcttgctgtaggcgatcatgtcattgtagatgccctcggtcacaccgatgatgcccgtctgctcgaccatgggggccgtgccgccgagcttctcctgccagatgggcgcgttcttgatgcggatatggccataggagaccatcacgtcagcctgaccggtggccagacgcgcgagcgacgtgctgtgcgagtcggactgcaccacgtgatccagatcggcaatggtcttgccatagtgctcctgcagccagaggctcgggtagatgtagccggacgcggacgtcggggcgagcacagaccaggtcgcgctgttgagatcgtcccacgtcagctcctcgccggcgttgaccttcttgagcagctcctgcccctttgcgctcgggccggccagaatgatcgagcggtagtaggtcgtcatgtcctgcgtgttttcctcgatggtgccgtcgttccagtcggcggggttgtcggagtccttgttgatgccgtagcgcagcgccgtcagcagcacgtcgcagtcatcggaaaacaggacatagttgccgccggagatgaagccgatgtccgcgctgcctgcgctgagcgcctcgcccacggcggtgtagctcgtgccgacggtcatgtcgatgctctgcacgtcatagcccttttccagcagcttcgccttgagcagcgcctcgagcggttcggtcgccgtcgtgatctgatcggcgtccgcatacggggagaacgcgatcttcagactctcgatcgtcttcgtgccgccggccgttccggcgtccttctggccgcagccggccatcaggccgagcgccaggaccagagacagcatcattgccactacttttttcatgtacataccctccagattttttctttccgccgaccgcaggcataaaaaattggcatatgcagcgctgcatataccatacctgacaaccggcagacgctgagaatccgcccctgcggacggatttggccggtcgatcctccctgggatcctctcaacccggaacacgggctccctcgcaatctggtttcgtcatcatttttctgttgagcgcggcgccagggcgctccccctttcgccgcattccggaaaccaatcgacagcttaccacatggtgccggagaatgcaagcggtttgtaaaataggagtaaaatttctgccgccgcgacattttcaccggcgaatacgcagcgaaacgaagaaaaacgtgggcagtgctgatgcaccgcccgcaagctatctcgcccactgacacctatgcaaagcaaatgctcgcacagccagcgtccctttcccaattgtctctttattccgggttgacttcctgagcgaatggctccccgcgggaagcccgctgaaaatattctctcactgtccggtcattctcacggttaatcaagcgccccggcacgatcagcagcgcaaagaaaagcgcgcacagcgcagcttcgcaaaggagcgcaggcgcagtatacacacctatacggatgataccgaacaaaatccacgccaagagcactgccagcttcagcagcacctgcatcggatagcgaaaaccaccctcaaggattgtgtgatcgccctgtgcacggagcgtaccgaaaaacacgcgcttcgggtacatatcatatccgtgcatcataaccgcccagaggcgctcaccctcgatctgcccgtatagaccgcgtcggtcattcgccggccttttcacactacgcaacagtttccccaatggccagtccgtctgcatatctgcacgtagccgctccttgacctcgtccagcggcagcggtatctcatagcgctgcttcatttctgtctccttcagtcgtccttatctcaagctcgttctctccaccagcggtcagtcttgtatgcctcggggatcgtctcgtcaaacagcggatcggcataccccatggctatcagctcatccacccagcgctcacgaagagatgccggaagcagaggctttgcacaccacgggcaataatgaatcacgatatgcgaatgcccatccccgcacgggatgccgtattcatgaaactgcggcagatatgagatcgctttgccatcgcagagctgtgccgtgtgttccgtcacgatgcggacatgtgcctgcatatcttcgcagcaaaaattcatacattccactcctatatctctcatcggttgaaagatggcgcgcacccatcctcgctcattttttgcgcttcatgctataaaaggcaccaaagaacacaattacgaacatgcccagtaatccaaaaccatagtcaatatataatacaatatcgaccgcttcgcgagtacggattacggctgccaaaagaaagttcgcgattcccagaagatatgcgtaaatctacatgcaaacggcgaccgtcgaaaaataactgtgttggtttttatcgcgcaagagcaaaaacactttgatcacgcgagtgtttttcaacttcacacgatgatggccggacagccgctccgagatcagcacctgatcgtcaaagtggtacccgccaaacaggaatccgaccagcaaaagcagccccattttcagcagctccacgttcattcctcccacttcaggccattctatttgaattctaacacacccctgcacagttgtccacgcaaagcaatggcacgcacggcgcgcccgcctcatattccccgcaaaaattcatatactgaattacgcaaatatggggagtggtgtaagtgcacacggacatggaagcgcgcgcatgcgatcttgcggaatatcttctcgccaacaataccaccgtccgcgccgccgccaaacaattcggtgtttcaaaatcgaccgtccacaaggatctgacggagcggctggagaagatcaaccccgcgctctatcagcaggtccggcagctgctggaccgcaacaaggcggagcggcacatccgcggcggcatggcgacgcggcgaaaatacaaaggtacataaaccggcgcgcggccacccggatgggcggccgcgccgcgcatatttcccgcaaaaacggaaacgctagcgtcgaaggtgattgcttgaaatccaaacgaatcggacctcagaccgtgcagtttgtcgccccgcccgtgatccttgcctccgccagcgtcgtaggcaaaaaggagggcgagggcccgctgcgcgattgctttgacagcgtcagtcaggacacctatttcggcacaaagagctgggagcaggccgagagcgccatgctgcggcagtgcttcgaccttgtgtgccagaaggccgggctgctcccggagcagctcgactatgtgctctccggtgacctgctcaaccaatgcgtaggctcggcctatgccatgcgcgacatcggcgtgccctatctgggcctgtatggcgcgtgctcgacgatggcggaatcgctcagtctggccgccatgctcatcgacggcggctacgccgagcacgccgccgcgctcacgagctcgcacttctgctctgccgagcggcagtaccggttcccgctggaatacggcggcgtgcgcacaccgactgcgcagtggaccgtcaccggctccggcgcgctcatcctcggcgcggccggcagcgggccgcgtgtgacgatggtgacgaccggaaagatcgccgacgcgggcatcacggacgcgaacaatatgggcgccgccatggcgcccgccgcctatgagacgctcaaggcgcactttgccgacaccggccgcacgccggactactacgacctgatcgtaaccggcgacctcggcaagatcgggcacacggtcgtgacgcggctgtttcaaaacgacggcatcgagctcgaggggctctacacggactgcggcctgctgatctatgacctggaggggcaggacgtacacgccggcggctccggctgcggatgcagcgcagccgtgctcgcggggcatctgctgaagctgctggcaggcggccagatccggcggctgttgtttgcggcgaccggcgcgctcatgtcgcccaccgcatccatgcagggcgaaagcatccccggaatctcccacgccgtggcgatcgaaacgcaggtgaacacatgatccttggctatgtaaaagcatttctggtcggcgccgtcctatgcatgatcggtcagatcctgatcgacaagacgaagctgaccccggcacgtatcctgacgctgtatgttgtggcaggcgtggtgctcggcgcggtcggcgtctatgggccgttcgccaaatgggccggcgcgggggcgaccgtaccgctgaccgggttcggcaacctgctggcaaaaggcgtgcgcgatgccgtggccgaaaagggcgtgctcggtgcgttcaccggcggctttgaggccggtgcggccgggatctgcgcagccattttcttcggtctgctcgtggccatgtgcttcaaatccaaagacaagcaataatacaggcaggcgcatctcgcgcgcacacgcgcaaaaaaagaaccgattcggatgaatcggttcttttttatgttcagtacggtttagcctctcgcagcggcttcgccggcctcgagcgccttcatgttgccctcgaggaacttggccttcttctcgccaagctcgatgcggatcgcttcgccaaggatctcgttggagacgaccggagccttctccatcagagcgccgaggatcgcaacgtttgcgcccttcgggttgccgacggactcggcaatgccgttggcgtcgcagtagacgacctggatgtcatcacgctcggccttgcggtcgatgatggagctgttgatgacgaggacgccgcccggcttgacgtggctctcgaacttgtccagagacggacggttcatcgccacaacacagtcagccatgtcgaccagcggggatgcgaccggatcgtcggagacgatgacggagcagttcgccgtgccgccgcgcatctcagggccgtaagagggcagccaggagacgtgcttgccgtcgagcatgcaggccatagccaggaacttaccgatcaggagcatgccctgaccgccaaagccagcaaaaatatattctttcttcatattattcagcccccttgtccttcttaacgccgagcgggtagtacggaatcatgttctcttccagccactccatcgccttgatcgggctcaggccccagttcgtcgggcaggcggacaggacttcgaccatcgtgaagcccttgccttccatctgataatggaacgccttggaaatggccttcttcgccttgacgatgttcggggtgttgttgacagcgacgcgctcgatgtagtaggagcacggcacttccgcgagcatctcggagaccttcagaggtgcgccgcaccagtcctcatcacggccataggggctcgtggtggtcttctggccaaccagcgtggtcggggccatctggccgccggtcatgccgtagatcgcgttgttgacaaagatcgtggagatcttctcgccgcggtgcgcagcgtgaacgatctcagcggtgccgatggaggccaggtcgccgtcgccctgataggtgaagacgagggtgtccttgccgacgacgcgcttggcgccggtggcgactgcgggtgcacggccgtgcgcggcttcgtacatatcgcagttgaagtaatcataagcaaaaacggagcagccgaccggcgcgacgccgatgactttgccgtccagattcatctcatcaatgacctcagcgaccaggcggtggataatgccatggttgcagcccgggcagtagtggaactgcttgtccgtgaggagcttggtcttttcaaaaacaacagacatttacttgccctccttcatgctgataatcttcgccttgatctcttcggtggtcggcatctggctgccgaggtggccaaagaagtcgaccggctttgcgccgttgatggcgagcttgacgtcctcgagcatctggccttcgttcagctcgacatcgagcacagccttcacgcccggctgctccgcagccttcttgacggcgtcgtacgggaacggccaaacggtgatcgggcggaccagaccaacgttgatgccctgctccttgagctcaacgatcgcagacttggcaatacgcgcaaccgtgccgaaagcggtgatgacatactcagcaccctcgaggttgtactcttcccactgctgctcgttggcagtgatctcacgatagcaggcctgcagctcgtcgttgtggacggacagggtctcggtatcgatgtagatggagttgatgacgccgcgctttgccggatcgtcgcccggtttccagccggtgcaggcccagggcttcttctcgggatcgatcttgtagtcgaccatctcgggcatctccacgggctccatcatctgagcgatgatgccgtcagccaggaagaggaccggtatgcggtacttctcagccttgtcgaaggcgtacatcatgatgtcgatcgcttcctgcacggatgccggagcataggtcagcaggtgatagtcaccgttgccgccgcccttgacagcctggaagtagtcgccctgggaagcctgaatgttgccgaggccggggccgccgcgcatgacgttcaggatgacagccggcagctgcgcgcctgcgcagtaggaaatgccttcctgcttcaggctgacaccggggctggaggaagaggtcagcgcacgtgcaccagcaccggctgcgccgtaaatcatgttgatagccgcaacttcgctctcggcctgcaggaagcagccgccgacttcgggcatacgtgcggacatgtattcaggaatctccgtctgcggagtgatcggatagccgaagaagtaacgcgcgcctgcacggatcgcagcctcagcgatagcttcgctacccttcataagcgtcaatgccattttcgatgtacctccttaatctctcacaatgctgattaccacgtccgggcaagtacgcgcgcaggaagcgcagccgatgcaggcctccggattcgcgacgacggacggatgataaccctttgcgttgagtttgtctttcgccagcgccagaacgcccttcgggcaagctctgacacagagaccgcaacccttgcaaagattctcgttgatggtcacctttaccatttttgctacctcttttctgttctgttttgcgaaattgcctatgtaaaccgcaagagcgggttacgcctgtttcttctccgacagactgtggatatagctctcccagtcgcgcttcatgatgatgtctatggcgacgggtttgccgatatacttcgggtcgtgaccctcggcaaggaaaatgtcgagcatctccttcttgccggtcgtgtacatgaccgggacgcctgtccggtcgctgacctcgcgcagcatctcataaccgtcgcgcagctccgccggcgtggtcatggtggcaaggttggtgttgttgatcatacccgtgatcttcaggtgggaatggatctccatctgctgctgcaggtcgatgatcttctccaccgtgccggcgagcgggcggcggatattgaccacgttcaggacctccagctgctccgggcccatggccatgaagtcctgaaagtcctcataatagcggccgagggccgtggaaccgacggcgtcaccgccgacgtcgaacacgacggtgtcccagttcatggcaaatgcagaagcgacctctgccggcagggacagcgtctccacgccggagcaggcatagttcggagagatgagacgaatctctttctgctccacgagcttgccgcgctccgtcaggcggaagtaggtattgaccaggtccaggtcaatgagttctgtctttccggtttcagccgctttaaaagcaaaattcagcgcaagctcactcttgccgctgccgtagttgccgatcatgacatatatttttttcaaaacgatgctcctcccctcgaggggtattaaaaatgtgcaaatgggtattaaaaaatgaaatgcatctattcaaatatccaaatctcaacggttatcatagtagcacaatcgggtgaattcgtcaacaaatgttgttctgttttgtggaacgtacacaattttgctcgccgtttctggacaagatgccagttatctacaaattaacaatgccgtctaagaaataactgtggtttttccctgcttcaggtagagataccacccgctcacgcccaccagaaacacgccgccgacaaggttgccgagcgtgaccggcaggagattgcccagcagcgccctgccccacgtcaggcccgcggccgccgcgctggtctgcgccgcggtcagcagcccagcagtgagataatacatatcggccacgctgtgctcaaagcccgcgacgacgaacgtcatgatcgggaaaaacacggccaggatcttgccagggacggacttggccgcgctggccatccagacggcgatgcagacaaggaaattgcacaggatcccgcgcacaaacgcatcgccgaacgacaggaacgccttcgcctgcgcgatggagatcacagacgccgccagccggccgtcaaacgcggcgaacacatgccccagcacgcagagcgccgcgacgagcgccgcacccacgaaattgcccagatagacaacgccccagttgcgcagcatccgccgtgcagagatcacgcgcgacaaaacgcccatgatcatgagattgttgccggtgaacagctcgctgccggccacgatgaccatggcgaggccggccggaaagacacagccggagatgagcttcgccagcgacggatcgcccaccgtggccgcggccgccgtggacgcgacgcctgccagcgcgacgaacgcccccgccagacaggcgagcagaaacatccgccccagcggcagcgccgtcttggcccggcaggtagaaagataattctccgcaacttcttttggcgtgtacacaggcagtccctccaaatcggcgcaagatattcggttagaatcatcataacatcatatatcttgtgtcgtcaagcccgggacatgaaaaagcagccggagaacagatctccggctgcctaggtggccagccactcgcgcaggcgctccacggcgcgtcgctccaggcgcgacacctgcacctgcgagatatgcaggatgccggcagcgcgctgctgcgtcaggccgtgataaaaccgcagggcgatgacctgccgctcccgctccgggagctggcacagcgcctcacgcagggcggcgtattcgaccatgcgctcttcctgatcgtagtccccaagcgtgtgctcgagcgtaaagccggtctccccgttctccttctgcagggactccgtagggccggtggccgtctcggcggcggcgatctcttcgggctcgagcccggtctcggccgcgagctcggagagcgtcggctcgcggccgagcgtctgctccaggcgcgtgcgcgccgtgcggatgccctgcgcgcgctccttgatgctgcggctgaccttgaccgcgccgtcatcgcgcagaaagcgccggatctcgcccgagatctttgggacggcgtatgtagaaaagcacgtgccgtactgctcgtcaaagccctgcatggccttcagaaagccaacacagccgagctggtacaggtcgtccggctcgacgccgcggccgaaaaaccgccgcgccacgctccagatcaggccggtgttttccgtgaccatctgctctgccgctgcggcgtccccagcctgggcgcgccggagcaggtcgcgcgtctcctcggcgatcatgcgcggcggcggatgcggcggcacatcgtcacggtcgtgccgcggccgggcacagacttgacccgcagcgtgtccatgaagctctccatgatcgtaaagcccatgccgctgcgttcttccccgccggtggtatacagcggcgtgcgcgcctgcgccacgtcggcgatgccgatgccgtgatccttgacggcgatctccagccgctcgtccggcaggatgcgcacgcgcacctgcaccgtgccgagcttgtccggataggcgtgcacgaccgcattcgttacggcctcggacacggcggtcttgatgtccccgatctcggcaagcgtcgggtcgagctgcgcggcgaaggccgccaccgccgcgcgcgcaaagccctcgttcacgctgcgcgccggaaactccagcttcatgtaatttttctgcgtcaacactgttcacactcctttgcccggtcctcgagcaccgggacgatattggtcaggccggccacgtccagcacccggcgcacctgccgcggcacgccgcacagcgccagtgcgccccctgtctgccgcaggaggcggtcggtcttgagaatgaccgcgatcccggagctgtccataaagctcaggccggacaggtcgagcacgcagcggcgcggcaggtactcctccacggcgtcctcaatgccgggcatgacttcctgcgccgccgcgtgatccagctcgccgagcaggcgcagcgtcaggcaccggccgtcatcatgcgttttcatccgcatctgctcatacctcctaaatcaaaagaaaaagcaccgtgtacgaaccttcgtacacggtgctattgtagcccagagacgtgggccgaatttgtcggacggcggcgctcagccgaggttttttaggctggcctcgagattttccacgagcgccctggccttctcggcgcgctcgcgctccgtctgcacgacggcctccggcgcgcgggagacgaagttctcgttcgagagcttgcgcatctggccctcgtagttcttgcgggccttttcgagctccttttccagacgggcgcgctctttgtcgaggtcgatcagctcggccatcggcatgaagagcttggcctcttccgtgacggcggagaccatcttctccgcgtcagccggcagctcgctgctgatggtgatctgctcggcgtaggcgagcttcgtgatatagatctcaccggagcggaaagcgtcctgccggtcggtcgtaatgaacaggtgcgcctttctgctcggcggcacgttcatctcggcgcggcggctgcgcacggcgcggatggcgttcatgaccatctcaaagtcgcgctcctcggccgggaaagcaagggactcggtatactccggatagcgggcgatcatgagcgcctcgccgtcgtgcggcagggcctgccagatctcctcggtgatgaacggcatgaacgggtgcaggagcttgagaatgtccgtcaggacatacagcagcacctgctgcgcgctgcgggcgcgggcctcgtcgccgctgttgaggcggggcttcgtgagctcgatataccagtcgcagtacgtgtcccagatgaagtcgtagatcttcgccgcggcgatgccgatctcgtacttgtcgaggttctcgcacacttccttcgagagcgtgttgagctttgagagcacccacttgtcctcgagctccagcgtctcgggcagctcgtttttgtcgatggtgaggttcatcatcacgaagcgggaagcattccagagcttgttggcaaagttgcgcatggcgccgcacttctcgacatagaagcgcatgtcgttgccggggctgttgcccgtgatgaggttgaagcgcagcgcgtcggcgccgtaggtgtcggccatctcgagcgggtcaatgccgttgccgagtgacttggacatcttgcggcccttatcgtcgcgcaccagaccgtggatgaataccgtcgggaacgggatgtccttcatctgctccaggccggagaagatcatgcgcgcgacccagaagaagatgatatcgtagcccgtgaccatgacgctcgtgggataccagaacttcagatcctcggaatccttatccggccagccgagcgtggaaaacggccagagtgcggagctgaaccaggtatcgagcacgtcggggtcgcggtggatgttcttgctgtggcaggcctcgcactcgcaggcgtcggtgcgcgagacggtgacatggccgcagtcgtcgcagtaccacgccgggatctggtggccccaccagagctggcgggagatgcaccagtcgtgcacattctccatccagttataataggtcttgctgaagcgctcgggcacgaacttgatgcgcccgtcgcgcacggcctcgatggcgggctcggccagcggcttcatcttgacgaaccactgcgggctcgtcatcggctcgaccgtcgtgccgcagcggtagcacgtgccgacattatgattataaggctcggtcttgatgaggtagccctgctcctcgagatcggccagaatggccttgcgcgcctcgtagcggtcgaggccgttgtacttgccgccgttgatgacgcgggcgtcctcgtcgaagatgaggatctgctcgagattatggcgcaagccgacctcgtagtcgttcgggtcgtggcagggcgtcatcttgacgcagccggtgccgaaatcgagctcgacgtaatcgtcggccacgatgggcagctcacggcccacgagcggcaggatcgccgtcttgccgacgaggtgctggtagcgctcgtccgccgggttgaccgcgatgccggtgtcgccaagcatggtctccggccgggtggtggcgatggtgaggtaatcatcactgtccttgagtgggtagcggatataccagaacgcgccgggcatatccttatattcgacctcagcgtcggacagggccgtgcggcagtgcggacaccagttgatgatgcggtttcctttgtagatcaggcccttttcatacagctcgcagaacgtctcgcgcacagcctttgagcagccatcgtccatggtgaagcggctgcggtcccagtcgcaggacacgccgagcgacttctgctgctcgacgatgcggttgccgtactgctttttccacgcccagacgcgcttgaggaattcctcgcggccgagatcgtagcgggtcaggccctcttccttgcgcagcatctcctcgaccttgatctgcgtggcaatgccggcgtgatccgtgccgggcacccacagggcggcatagccctgcatgcgcttatagcgcgtgaggatgtcctgcagcgtcgcatcgagcgcgtggcccatgtgcagctggccggtgacgttcgggggcggcatgacgatggaaaacggctttttgtccggatcggctttgccggcaaaatagccgccgcgcatccacatgtcataaatcttgctttcgacctgtttggggtcgtagaccttcggaagctctttcatggctctcctcctttaagattgccggggcgcaaaaaaatcgccccgaaacgaactgtttcagggcgatcgaaaccgcggtaccacctgaattccacgcaggcgcgtgacactcttgtctctgtaacgggagaacccggccgccctactccgttcaggccggctgctccggggcgaccttcatctccggcatccgaaaggctcgcaccaaccgccttctctctgacgtccgccgggagactactcctccccttcttcgcaaatggatgggaaaattataggccctgccgcgccgtttgtcaagcgtttctgagccagcgcacgaccgaaagcgccgcgcggttgccctcgccgaccgccgccgggatctgatagggcgcgccggtgcagtccccggccgcgaaaacgccgggaatgctcgcggcatagctttcatccacgacgatgtggcccttttccgtggcgatgccgggcagaagcgtatcggccgcaaagcccgcgcgcaggacgaagatgacgtccgccggctgtgccgcgccgtcgaccacgagcgtgtccgcccgctcggcgccgcggatctcaaagcggtgcttttttccgtcgtaatactgcacgtcgcagccgatctcacgcaggaaatccgcctccgccggggcgtccgccgccaggccgatgaccgccgcgcgcttgccgcggtagagcatgccgtcgcaggtagcgcagtagctcacgccgcggccgagaaacgccgtttccccgggaaacgtgccgcgctgggcaatgccggtcgcaagcagaagcgccctgccctccacaaattccttgcccgccgagacgccgaacgttttgcccatcggcatggccgacagcgcccgctcgcgcagcatgtccgcgccaagatcgcgcgcctgctgcgtcatggtctcgagcagcgcggggccggagacatccggcacaccggggtaatttgtgacatggccggctttatacagcgcgctgtcggccgcgccgccgcagatcacgcacacggtcaaattccggttgcgcgccgtcatggccgccgacagccccgccgggccgccgccgatgatgagcaggtcatacatatatccgcacctccgttgtcttacaatcctgtctgaattatatatttctttttcgatattgtaaacagaaaacgaatcgtgtataatacttttacatttttctgcccatcgcaaatttatgtggagttgacatgacactatggaagataccaaaaactttatcgaagcctttgtcgaagaggatcttgcgcccggcggccgcttcgccggtcagaccgtccacacccgtttcccgcccgagccgaacggctacctgcacatcggccactgcaaggcattgtgcatcgatttcggaacggccgaaaaattcggcggcatctgcaacctgcgcatggacgacacgaacccctccaaggaggacaacgagtttgtggaagccattcaggaggatatccactggctcggctttgactggggtgaccggttcttcttcggctcggactacttcgagaaggattacgaatacgccgtggagctgattaaaaaagggcttgcctatgtgtgcgagctgacgccggagcagttccgcgaataccgcggcgatgtgaacacccccgccgtcagcccctggcgcgaccgcccgatcgaggaaagcctcgatctgttcgcgcgcatgcgcgccggcgagttcccggagggcaagtataccctgcgcgcgaagatcgacctcgcctccggcaacttcaatatgcgcgaccccgtgctctaccgcatccgctacatcgagcaccaccgtcagggcacaaagtggtgcattttcccgatgtacgacttcgcgcacccgatccaggacgcgcttgagggcatcacgcactcgctgtgctcgctggaatatgaggatcaccgcccgctgtacgactgggtcgtaaacaatgtgtccgtgccgtgcaaaccgcgccagatcgagttttcgcgcctcggcatcaactacaccgtcatgtccaagcgcaagctgcgccgcctcgtcgaggagggctatgtctccggatgggacgatccacgcatgccgacgctgtgcggcctgcgccgccgcggctacacgcccgcgtccatccgcaatttctgcgagcgcatcggcgtgtccaaggtcgcgtccacggtcgactacagctttctggaacactgcctgcgcgaggatctcaacctccatgcccagcgcgccatggccgtgctgcacccggtgaagctgcgcatcacgaactatcccgagggccagagcgagacgtttgccatcgagaacaatcccgaggacgaaaacgccggcacgcgcgacgtgacgttctccaacgagctgtggatcgaagccgacgacttcatggaggagccgccgaaaaagtataaccgcctctaccccggcaacgaggtgcgcatcaagggtgcgtacatcgtccgctgcaccggctgcgtcaaggacgcggacggcagcgtgacggaggtcctgtgcgaatacgaccccgagacccgcggcggcaacacgcccgacggccgcaaggtgcgcggcacgatccactgggtcgatgcacacaactgcgccgacgccgaggtgcgcctgtatgataacctcttcgccgacgccgaccccgagggtgacggcaaggactatctggcgtgcctgaatccggactcgctgtccgtgctcaccggctgcaaggtcgagcggatgctcgccggcgccgaggctccggccgcgttccagttcctgcgtctcggctactttgccgtggataataaggacgcaaccccggagcatctggtctttaaccgggccgtcgcgctcaaggacagcttcaagaaagcctgaccacaagatcctgtaccctgtccctcccgcagaaaacgggagggacaagtttttgtgacgaaaatgtgaatttgctgttgacaagcgcagcatccggtgctatgctgtgcacgctgatatttttaagtcggtacgagataccggcaaggtgtcacggtcaatggaatcactgcgggctctccctgcgcgttgccgccttgtctgtatccggacagggtgtttttttatgcccggaggagggatcgctgtggagctgaaattcaaggcaaagatcatggacgaggccgccatcgaccggacgctcgtgcgcatcgcgcatgagatcctcgagaaaaacgacggcacggacgatctgtgcctgatcggcatccgcacgcgcggtgtgccgctggcccgccgccttgcaaaaaacattgagaagatcgacggcgtgcagctgccggtcggtgagctggacatcacgctctaccgcgatgatctgtccacggtcgcggacgcgccggtactcaaccgtacggacattcccttccccattgcgggcaagaccgtcgtgctggtcgacgatgtgatctacacctgccgcaccgcgcgcgcagcgctcgacgccgtgatgcagctcggccgtccggcgcgcatccagctcttttccctgatcgaccgcggccattcggagcttccgatcaaggccaattacgtcggcaagaacatcccgacctccaagagcgaggtcgtggccgtccgcctgcaggaaacggacggagagaacagtgtctgcatcctcgagagaggataaagaatagattaaattttcacgggaggaaaaaatctatgagtaaaagctccatcggtaccgagccggtgtacgacgcacgtacactcggcaagcccagaatgttcattctgggtctccagcacatgttcgccatgttcggcgcgaccgtcctcgtcccggcgctgtccggcctcgacgtcgcaacgaccctgctgttcgccggcatcggtacgctgctgttccacctgctgaccaagggtaaggtcccggccttcctcggcagctcgttcgccttcatcggcggctacaacgccgtgcgcaccatcggcacgaacgccgacggctccgccatttacaacaacgacctgctggcatacgcctgcttcggcgtcgccatcgcgggcctgatgtacatcatcctgtcgacactgttcaagatcttcggcgtcaagaaagtcatgcgctacttcccgccgatcgtcaccggcccgatcatcatcgccatcggcctgacactctcctcttccgccatcaccaactgccgtgccaactggctcgtcgccgtcgtcgcgatcctgatcgtcatcggcttcaacatgtggggcaagggcatggctaagatcatcccgatcctgctcggcgtgctcggctcttacatcttcgcactcatcgttgatcccgcggagcgcgcctccgtcgccgctgccgtcagcagcgccaagtggttcggcctgccgatcttctggaaaaacagcgtgttccacctcttcgccggcccggtcgacagcggcgtcctctggtccgccgtgctgacggttgtgcccctgtcccttgccaccatggtcgagcacatcggtgatatctgcgccatctcctccacctgcggcaagaacttcatggtcgaccccggcttccaccgcaccctgctgggcgacggcctggccaccaccctcgcttccctcttcggcgctccggccaacaccacctacggtgagaacaccggcgtgctcgccctgtcccgcgtctacgatccccgcgtgatccgcatcgcggcctgcattgcgatcgtcgtgtccttctgcccgaaattcgcggccctcgtgtccgccatgccgacggccaccatcggcggcgtgtccctcgtgctctacggcatgatctccgctgtcggcgtgcgcaacgtcgtcgagaacaaggtcgacttcaccaacacccgcaacgtcatcatcgccgcgctcatcctcgtgctcgccatcggcatcacctactccggcagcatccagatcggcgtcgtgtccctgtcgggtctggctgtctcctccatcgtgggcatcctgctcaacgccatcctgcccggcaaggactacaccttcgagcaggacgatcagggcgcgacctctgtggacttcaaggtctgagcccgcatcgaaaccaaatacgcaccggccgccgcaacgcaaagctgcggcggcctcttgtttttcccttccccatggggcgcgattgttaaatttgtggccggttttttccaaaaaatcagttgtagtttcggaaaaaatgcgttatcatgaatgtgtttgagagcaaaaaagaaaccaaaaatacaaagaaaaacggaggagcaacatgaaattttccagtaagatcgaaaagtgcggcctctcgcccatgcgcaagttcgcgccctatgcaaacgaggctgccaaaaagggcaagaaactctaccacctgaacatcggccagcccgatattgccacccccgcggcctactttgaggctgtgaaaaacttcagccagccggtcctggcctacgccccgtccgacggcgtgcccgagatgatcgacgcggtcgtcaactactacggcaagatcgatgcgcccatcactaacaagcaggtgctcatcaccaccggcggcagtgaggcgctgcagatcgcgctcagctgcattctcgacgaaggcgacgagatcatcatccccgagccgttctacccgaactacagcacgttcgtcacgctgaccggcgcgaccatccgcccaatcaccacaacgccggaggagaactacaagttcgccatccgcgagcgcgtcgagtcctgcatcaacgagcacacccgcgccatcctcttcacaaaccccggcaacccgaccggcacgatcctcaccgaggaagagctccgtctcatggccgacatcgccaaggagcataacctgttcatcatcggcgacgaggtgtaccgcgagtttgtttacggcggcgagaagctcatgagcctgctgcagctcgagggatatgaggacaacgtcgtcgtcatcgactccgtgtccaagcgcttcagcgcctgcggcgcgcgcatcggctgtgtgatcacgcgcaacgcagagctctacaacaacgccatgaagtggtgccagggccgcctgtgcgcctcgacgatcgaccaggtcgcgtccgccgcactctacaccgtcggccccgagtacttcgacgccgtgcgcaaggaatacaaggcccgccgtgacacgctcgtcgatgggctcaagaagatccccggcgtcatttactccgagccgaagggcgcgttctacgtcatggccaagcttcccgtggacgacgcggagaagttccaactgttcatgctcgaggagtttgacgacaacggcgacacgctcatgttcaccccggccgagagcttctacaagaccccacacaccggcgtcaatgagatccgcatggcctacgtcatcaatcaggacgccctcaagcgctccatggagctgcttgccaagggcatcgaagcctacaacaacaaataagctgcatacgcaaaaaccgtccgctcccgatcgggaacggacggtttctttatgggatttcgtttgctttctgccggcgtttgagattgagcagcacgacggccgagagcacgcacacgcagccgagggcgctgagcggtgtgagtttttcgtggaacacgaagatgccgaccagcgtcgccacgaccggctcaaacgacgccaggatggacgccttacccgtctcgagccctgtgagaccataggtatagagcagatacggcagatagcacgtgacgatgccgagcgccgtgcacaggccgaagcccttccacgaaccgatcatgacgccgagcggctgcgccgcgccccagatgatggccgcgccgatggtggtcagcaggcaggaataaaagttgatggtgttgctcgaatagccgcggtcgagcgcgtagcgggcgaagatgctgtagagcgcatagccgaagcccgcgccgaggccgtagagaatgccgaccgtggagagcttgtgctccccgccgacgagcgacaccagacagcagccggcaaacgccagcacgagcgcgatgagcttctgcaccgtgatacgctcgtgaaacaggatcagcgagaggatcatgacgatcgacggcgcggtgtacagcagcacggccgccgtggacagatccatgatcgtgatggcctgaaaatagcaatacgtgaaaaacagcaggctgcagatgccggcgccgataaaacaccagatgtctttgagccgaatgcgaaactgctttgggtcgcgcacgaacagcgtgacggcgaacagcagcgccgcaatgccgcagcgcagcacgatcgcgcccgtggaatccacgccataggtcgccagtgtgcgcgtgaacagacccatcaagccccagagacacccagccgtgatgacggacgccgtatatttctgcattctgcacccctccagatcaagctttcgacagagcatgatatcaggtttccggacggttgtcaatttgtgtggacaagaaagttttgcgcggcatttgcgtttgcccacttgtcaagccgacacggctgtggtaagataattgtgccgtttgtaacggtgcgcggatacagcgttttgctccgcctcgggaacctccccgtgtcaaaatagaggcttatgagcggcggccaataccgccgctttctgtttgcgcctgtgatggaattggtagacatgcgagatttaggttctcgtgctttcagcgtgtgggttcgagtcccttcaggcgcaccaaagcccccacggcggctattgttgtatggccgccgtgggggcttcttttttgccatgcatccaccggccgatcgggcgcgatcgccgcgctttcagctgcgctgcgccgagcgcaagctcgtcgcgcgtcaggccggaatagcgcagaatgagcttgtttttgtgctggcccttcacagcggcctgctgctcgaccggcacggcgtaagcgccctgctgcagcatccgccggacgagcacatccatgcagtcgaccccgtcaaaggccgcgaccagattcatgcccgcagcaccgccgctgatgtgtaccacaggcccgaactgcgcacgcaggcagtccgtcagatcatcacggcgggctctgtattcctttttcatgcggcgggtgtgccgctcgagctccccatcgcgcaaaaacgccgccagtgcaagctgatcgagcgaattggtgtggtggtcagacaggcgcttttgcgtgcacaacgaggcgaccagctgccgcggcgccacgatgtagcccagccgcacggacggaaagagcaccttgctgaacgtcccgacggagagcacacgctccggtgcaagctcgaagagcgaggacgtcggtggagcttcatagttgaactcgctctcaaaattgtcctccaggagatacgccccggtgcgtttggcgaacgcgaccagctccatgcggcgcgtcatgggcatgatcgcgccggtaggaaactgccgcgcaggcgaacagatgatgagcgtgggtttgcgcccgaccggaaaccgcgcgggatctccaatgtgcagaaaatatgcgaaaccttttgccatgagcaccgtcttttccagtaaaggaaggtggttatttatgaaaaaagcaagactgctcccagcactgatcctggccctgctgttcctcctccccgccggctgcggcaaacaggccacgaccgtatctccgtcaacaccgacgcccgctgaaaccgtgaccgcatccggaactgccggaacgctgcgcgtgcaggtgccggacggctggaagtatgaagtctgccccgaagggacgctcgacgactcggaagcctgcttcggcgtgaagatctggccggacagcggctcggacagctgcgtgcagctctattggtcggacagcttcggcgtgtgcggcacagggctgaaggaagagaccctgacgctcgccggagacagcgtctccgccgggtattatgacggcaacaaaaactggacgtttctcagctttcagggcaaaaacagcggcatcgtcgcctgggccgatccgaacgccggctggttcgcgggcaagggcgaccagctgctggccgtgctcgatacggtcgaatgggaaccggcagcataaataaggtcataaaaaaatacgccccgcagcagaagctctgctgcggggcgattcttgtaatatgttatttcgccttatttcaccgcggccgcgcctacctcgggccgtacgggaatgccggagtcactcactgtctcaatattcgaaaccgtctatgcagttcatttcatccagcgtgtattggtcaacactccactccacaatcaaaccatctacttcccaccacgtggaattatcctgccggaaaacctcgacggcaagtcgagcgtcaccttcatttttaaatacaccgaggttccggctatattcaaattcatattccgcatcgtgaatgtagacattggccagataaacgagcaccgcatgctcttccacttcgtgcgcaaaaacgacaaatccgttgggataatcacaaaagccgggaatgctgcgatacttttcgattgctgctgccacccgctccgccgacgaaaagcagccgagcatcgcgcaatccccgtagtggaagcggccatccgccagcgtttccgccccgtgcatgtgcaccaattcataaattttcatctgtcgttttctccatgacttctgtgatctccgcaagcagaatttctgcgcggcactgccatgatagcaggcgtgcgaaaacctgtcaacacgccagtgcagcggtcgataaaggctccataaggcatgtatctcacgtatttgcaaaaacacctcgcagcggcaagtgctgctgtgaggtgtctctttgttattttgcctcagcgggaatagcggcggatgccgcttcctcggccacttcggcctcgggctgcgcggcggcaaagccctgcgcaaggccgtgctcgcggatgtacttgcggtttttgtacacgccgacggtcaggaacggaacgaccacgaccgcgatgccgagatagccgcagtagccatagccgtacttgatgatgttcgtgaggccggccatggagatggacatggacaaaatgatgatgaacgcggacacgatggcgctgcgcaccggcgcggactggatgccgcggaacatcggcagcttctcaaagcgggcgacgaagccgaagatcgtcgtcacgcccgtggagataaggcagagcatgaggcagacgccgtaaactgcggtgagcgcgcggatgcccatcgaattgcagacggtgagcgtggggatggtcgtgccgccgtccacggcggtgtagacgccgcgccagcagatgagcatgaacacggagagcacgagcgcgaccgcattcatgacaaaggagatccacatggccttggcacagccctgcttgctgcgcatggtcgtgccgcaggcgatcatggtcgggagcgtgacgcactggaagccggcataggtgaaggcattaaagatcgctttggggacattggcaaagccggtcgtccggaaatccgcggagagcaccgtgaacagcggcgactcgctcttgaaaatgccgatggcgtagatggtgatggcggtgacgaggatggcgatgcccatataggtggacgccgcgcggacgatgccggcgccgaaaatggtcaggagcaagacgaggcagccgacggccacaacgccgagataatagttcacgccgaaatagctccgcagcgcggacgccgcgcccgagatggccgccgcgacggccatgagcaccatgatgtaaaagaagatctcaaacagccactcgatcttgtcaaaggggtggtagagcgtctcgaacagctgcttatagctcgtcaggccgcgggaattgtacatgatcatggcctcacgcatcgtgagcgtgagcagcagcatggccacgatggccgacacgatgccggcccagccgaggccgacgtaatacgtattggcctggttgccggtcgcaaagccgccgccggcgtgcgcggaaaacagcaccgcgccgaccgagaaggcggcaaaaaacggggtcttgggtatggttctggttctggtttgggttttcatgattcgttcctcctgcaaaatgatctgatggtttggcaggaaaaaagaaaaccctccgcctttcctgccctctggcagaagagacgaaaggccgaaaaccctccgcggtaccactcttcttcgcccccaaatcaggggacgcactcacacgggataccatcatatccctgcacaataacgggcgcacccgtctgcacctactcatcgttcagcgcagccgctgttcagccagttcggcaggtctgtacgctttgtgcctcgcaccacccggcacttctctgaaaggacgttcctgcttactactctgtgtcttcgcgtttgatggcttgatgataacacccgtatccggcgcgcgtcaaggcacgcattcaccgaaaaaagttgaaaaattcgaaggaaatttgtcggatccatgcatccagctgccgcgcaaaaagccggccgtttccgaagaaacggccggctcgtgctcaggttttggtatgtgcgttaccgggtgcggctcacttggcgaagtagttatacaggaagcgcaccatatgcgcacgtgtgcagttcatcagcgggctgaaggtcgtgctgctcgtgccgttcgtaacgccctcggccgcagcccacgccacggcatcggcatagtaagccgttgccgggacgtcggcaaacgtcgtcttgttctccacagccggagcgccgacatagcggtacaggaacgtgacgcactgcgcacggttcgcagtcaggttgggactgaagtgatggtcatccgtgccgttcgtgatgccctcgcccacggcccagagcaccgcctgatagtagtaggcatcctccgagacgtccacgaacggattgttcatcgacttgggcgtcggcttgccggcggcgttccacaggaacatgaccgcctgcgcgcgggtgcagctcatatcgggcgagaaatgatccttgctcgtgccgttcgtgacacccgcatctgcggcccactggacggcgtcgtagtaccaggcgtcctccgccacatcgacaaagacgatggcgggcttgtccttcgtgaacgctgccgtgatgatctcgctggccgtgcagccgtccttgacggcgatggccttgaccgttgcggactccgtgagcgtgaacgcgccggtgtagagcgtgctgtcggccgtcgggtcgctgccgtcgagcgtgtagtagatgcgcgcgccctcggtcgcacaggtgatggtgaccgtctgtttgccggtgaaggtgccgccgttcgggtcgatgaccggagcggccgcagactgcagcacggggatcgtcggcgcattgccctggcggacgatgccgtcgagcacccagctgtcgatcgtgagcttggcttcgcgcaccacgatgtcaaagtcggaaatgccctgggcaagtgccgtgcgcaattccttatcctcgcactggttgtcgttgagcaggtcgcggaaggcctcactgcggagctccgccgcggtcatgccggcggtctccttgacaacgccggtgttgccgagcatggtcacgttctcaccgaccgccttgggctcggcgatgaccgagttgccggagcgctgctcctgctccttgttgaagtagccgtagatgatcgtgccgatggcggtgttgcggccggtgatgccgccgatatcgccggtggcgttcttggacaccagcttcacgtcggcgtagttgttgccggccacaccggcctgcatgccggcgatgccgccgatggtggcggagttgacaccggcctcggcatagatgctgccgcgggcatagttgttggcgacgatggcaaagccgtcctggccgacaatgccgccggcgagcgccgtgccgccggtcgagatcgacgtaatgtcgacctgcgcgccgcagttgaggatcatgctgttgtagcagtaggccgtgatgccgccgttctggctccagtcaacggacttgttgtagatcgtaccggagacggtgcagttgttgatgacggctccggcgccggtctcgctgttgtcggtgacaccggcgatgatgccggcataggtacgcacggcatccagacgcgcgatgtagatctccgcatccgccacggcgagattgcgcacgactgcgccgtcaatgcaggcgaacaggccggcggaaacatagtccgcaggcgtttcctgcgtgccgatcttcatgccgcggatgcagtggttctgcccgtcgaagataccggcaaagtagtggccgcccgcgctgccgaccggcatccactgggcgtcgccgaggtcgatatcggccgtgagcacgatgtactcaccgtcgaagtgctcatcggcgttgaccgccgcggcaaaggcgcgcagctgcgccgccgttgcgatctgatatggatcgttctgcgtgccggtgccgcccgcgaagatggaggacggatcggcaggatcataggtgctcgtatcgccgagcagcgccttgttgacggcgacggacagcgccgctttgagcgtctggtcatcgctcgtaccgtcggaggcgttcttcacggtctggtctttgagcagcgccgcgagaatgctctcgctgttggcagcgtcaaagtcggccggggcgacgacctcggcggagacgatcttcttgtcggccactgtgatgcgcacgatgaccttcttgttcgcgtcgcggccgtagtagatgccgtccttgtaatcgtagttgatgctcggatccgggcgctcgaccgggacataggtgatgtttgcgttgtcggtgccgaacacgacggcgccgtcctgaagcgtccaggtgcgcagcgcggcgggcaggtcgtcctccgagatcgggaacgcgccgaagttgccgttgagcttgtcggcgagtgcctgcgcggtcatgtccgctgccgggagcgcctcgacgttgctgacgaacgagccgctcatgaattcgccgtcctcattgtagccggacgggacctggctgccgaacgcgaccggcgggtcgaatgtctgatccttgatggtcagctgcgcgccgtcgctgaagtaggagtcgtagctctcgctgatggcggtggccataccggcgatggcgccgacatagcgcgtccagctgcgggaggtgcagttgctggtggtgtagcagttagcgatggtaccggcctggcagcctgcgatgccgccgaggtaggtcacgccgccgtcgtccacgttctcgcggtcggtctcaccggagatatcgccgaacgtgtagcagttaacgatcatgccgtaggcgttcatggcagtgatgccgccggcctcggcgttggccgtcttgcagaaggcatcgagcgtgacgtcggtccaggagttgaggatgtagctgcgctggctgtagccgatcaggccgccggtaaagctgttgtttttgtactcgccgtcttcggtgcgcacggtgatgtcaccggtcgcccagcagttgttgatgatggcaaggtcgcagcagccggccagcgcgccgccgatggcggactccttatcggccatgaggtggatgctgacgttctccatgccgaggttttccacaacggagccgttcatgagcgctgcgaacaggccgaagtacacgcgctgctccgcactgaccggggcggtcttgctgccgatggccatgttggagatcttgtggccctggccgtcgaagctgccgcggaaggcctgcgtgccgttggccaggtggccgatcggcgtccaggcttcgcctgcgaggtcgatgtccgcgccgaggacgatgtatttgccggagtaatccgtcttggcaaacgaagccgcaaacgccttgagctggtcagggttctggatgacccaggggtcggcctccgtgccggagccgctctcgaagaagtcgagcaccggcgcgtcgggctggacaaagacgtccgcgccgagcacggtcttgccgtcgcgcgcttcccagccgtaccacgcggcgggacgcatggcaatgagcatgtcggtcgtgaagtcgatgtcgtcgctcgtgaggaacttgtccgtggcggcgaggccctcggccgtcaggccgtggttcatggtgtcgacaaaggcggcgctggaggtgtccacaccggcgacgttgttcgtgtcgccgctgacgagatcgccgatggcggtcgcgctgccggacgtgccgttgacagacacggtagccttgctgttatagtagcagtcggtcacgatgccgttgtagctgcggcccgtggacatctggccgataaggctgcccacggccggttcatccggcgtgatggccatcgtcagtgcaacattgccggctgcgtagcagttgtggaacagaccggtcgcctggccgacgagaccgccgacggaggcgcttaccttggaagaggtcgtatagcccgaaatggccgtcacgtcgccgagggcggcgcagttggcgatcatactgccgttggagttcgtggcaacgaggccgccggccgagcacaggccttcggtggatttgacctgcacggtcacatccgtccaggagttggtgaggtaagcatcgaggtagagcgatgcggtcaggccgccgccatacgcccactgcttgccctccgtgctgacgatgccgcccacgacggagcagtgatcgatgcgcgcattcttgcccatgccgaggttaccgccgacgagaccgccgacgaacggacgttcatagtcagcggtgattttgccgtacactgcaacgttggtcaggttcaggttcgagagcgtggcgccgtttgccagcacgtcgaagaagccgacgcttttctgctcgagcggcgcgagctcggtgccgatgcgcacgccggagacggtgtggttgcggccgtcaaagttaccggcgaagtagtggatgggcgtccacgcaccgttgagggtgatgtccgcgtcgagcgcgacatactggcccgcgtagtcgaccgcgttgtcgccggtggtggaggcggcaaatgcgcgcagctgcgcctccgtcttgatgacgaagggatcggccttggtgccggtgccggaggcaaagatgctctcggccttcacgccgagcaggactttgccgtcggcagcgccccagctctgccagaccgccggacgcatggccgcaaggcccgcggccgtgtagccggagaacttgccgctgttgatgaggtattcatccgtcgcggcgaggccctcggtggagatgccctggttcataacggcggcaaaggcgtcgttcgtaacgtcgtcctgcgccgtgatcttgttgtagttgatgccgctgtaccagctgtcaggcgtcttgccgaccgcgatgaggtccttgctctcgccgttgacggtgagcaccgccttgctgctgtagtggctgtccacgacggcactgccgctctgctcgccgatgagcatgccggcataggcgtcatagtcgctgctggcattcgtcagagtgacgctgccggccgcgtagcagttttccgtcaggaacggggccgaggccagcaggccgcccgctctggtgcggttatactgcaggctgttgccgctggcggtgacatcgccgagcgcggcacagttgccgacgaagctgctgctgccgaacgtgccaacaaggccggccgcgttggcaacatacttgctgctggtggccgcgacgtcgatatccgtgtagcagttggtaacgtagttggtgccgccgagtctggcagcgaggccgcccgcgtacacgtgcatgccggaggacgcggaaatggtaccgcccgtgaccgagcagttgtcgatgcggacgtcggcgcccatggtctggccgccggcgatcaggccgccggcatagacggtatcatccaggctgctgcccgtgcgcacgacgttgaccgaaacgtccgtcagcttgaggttgctgaccgacgcgccgtttgccagcgtctcgaagaaaccggcgctggtgcgatccgacggctgcgcgctcgtgccgatggtcatgccggaaacggtgtggccgtcgccgtcaaagctgccgccgaacttggcgatcggcgtccacggctcatccgagagcgcgatatcggcatcgagccggatgtacaggttcgtggtgctgagcttgccgttctgggtggcctcagcgaaaccgcgcagctgcgcctcagtctcgatgcggtaggggtcagcctgcgtgccctcgccgccggcgaagaagtcgctcggatcgacaggctgattgctgccctcaccggtcggcagcaggcggccgttttcgacctgccagctgttccagccgttttcactcatgctcagcaggctgttcatcgtaacgccgttgcccagcaggccgacggccttgctggagaaatacgcctgcgcatcggcaagcttttcctccgtgagcgcgtcggcaagattcgtctccagcacgccggaggtgagctccgccgacgtcagaccggcgcactcttcctggtcgctgaccgagtagctgagcgtggaatagccgaccgcgaccggctctgccaccgcttcatcgttataataggtctgcgccgcgtcggcgttgaaccagcagcggtaagcggccgtgcaatacgccggcgcgccggcgatgccgccgatggggacatcggaaccgtcgcccgcatcggacatggcgtccatgtgcagggtcacgtcggagtagcaggcgtagatcgcgccgcagctgtagccgacaatgccgcctgcgccgtacatcatggagccttcgcagtagttgccgatcgtgccgaacgccgcgcagttgatgaccgcggaatcgttgctcgtccagccgacgatcccgcccgcgccggtatcgctgcccttggccacgatctgcacgtccgcccaggtgttgcacaccaggctcttgccgccgttattgccgacgacaccgccgacgtaggtgtagttgttgtcaccggccgcatcgctgatgatcgtgccgctgacccagcagccgtcgatcacgctgctgtcgccggtgccggccgccagaatggcgactgcagggtcttcatccgtggtcttgttgttgatgaacgcatccttgacgcccaggttgcggatcgcaccgcccttgccgacaaggccgaagaggctggcatactcatacgcggcgggctcggctttcgtgccgatggtcaggccggcgatcgtgtggttgtcgccgttgaagatgccgttgaagctgccgctgtcgccgccgatcggcgtccagctctcgccggtgaggtcgagatcggcgtcgagcgtaacatactggctcgcgtaggtctcaccaccgttgaccgaggccgcgaacgccttgatctggtcgaccgtgcggatcagatacgggtcagacttcgcgccggtgccggcggcaaagatgccggtgtccggctgctccggctcggtgacgagcgccttgctcagcgcgtcgttgaccgcggctttgacgccgttgctgctcatggtcgcgccggaaacaccgtcgatctcggtgccgttggccttgacgatatcgtcaaagagcgaggcgacattcatagtttcccaatagctctgcttttcctggctgacgagttccaccttggcgatcttgccgtcggtgatggtcactttgaccttgatctcgccatttttgaagccctttccggtgccctcatagacaccgtccttgtagctcgtgccctcctgggcatacactgcggtcagatcgccgctcgcgccggtgtccgcggcataggccgggagcgcgcagccgacgagcatgaccaccagcagcaccagggacaggagccgtttggtgattgccttgttcatgggttggtcattacctcctgaaaaaatatgatatgtatattgtttgtgcattcagcggatctgtgtgcggcctcaccttccctttccgccggtcggtcccggcatatcatgcatgcagttgattgtacaaaagcgtcacgatctgcgcgcgaatgcagggggccgcgggcgaaaagcagttgttgcccgtgcccgtcgtgatcttattggcggcggcccagcgcactgcggccgcgtaatacgcatttgccggaacgtccgtgaacgtctgatccgcggcgacctccgggctgccggcggcgcgccacatcatcgtcaccgcctgtgcgcgcgtcacgatgccgttcggggagaaggtcgtgccgctcgtgccgttggtgatcttgcgttcgaccgcccagcacagggctttgtagtagtaagcatccgccgacacgtccgtaaacgggacggtcagggaactcggttccggtttgccggcggcgttccagaggaaggtcacgctctgcgcgcgcgtgcacgtcgcgttcggggcaaagcaggtgctgctgacgccgttcgtgatgccgcagcgcttggcccaatagacggcttcggtgtaataggcgtcatccggcacgtcgtcgaacggcgtgaccggcatcagcgcgccgcagcggacgcagacgccgttttgatagctgtggccgagcgaatcgccggccgcgaccgtcagcgtctcactgacggcatcgcagcggtcgcactgcacgtaatactgcgcaggctcggtgcaggtcgcttcctgcgcgcaggcggcggaagccttgtcatgaaatgcatggccgagcggggcgagcgtgtcacgataggtgccgccgcagacggtgcaggcatattccacccatccgggctccgtgcaggtcgccgcccgacgggcggactccacatactggtgctcatgggccgactgcagctgtgtggtgtaccacaggccgctggtctcgccgcgatagagcgtcagcggggtctccgtgctgcgcacgcagcggaaatactgcttatccgcgcagaactgcaggctgcgcgccatgaagcgtgcattttgaatgacaacgcggccatccttccagctgatgagccagcgggcatagctgctgctgccgtccacgtcggaattgagctggtcgctgttcgagcggcaggccagatacagcgatgacattgcgccgccgagccggatggtatactgttccgtcccgggcacgcgcgtgatctgcacggtatacgtgccgaaaacgccggagacatttccgtccgcgtccacggtgatgccggtattggcaagcggcacggcagcagcggtgctgccaagcgccgccccgtaaacggtgccgtcacagtgcaggacgctgtcaccgccgcgcaggacatacgtcccgctccagtcatccgtgtccgccgtgacagtggagaacgcaggcgtccgcccatccggcgtggcaaagtattgatagagcgcgtagagcgttgtctccgcacctgtgacatcatagcgctcacccgcgcggagcacctgcgcgctcacggccggggtctcgaccggctcggtcgtccagccgacgaagtgataatcctgtgcgtcagccgtgggcgtgcccgtcggctgcgggagtgtgatcggatcgccgatataaccggcgacatccggctgcgtcacgccgtccggcacggagaagtgcacggccgccggcgtcttggcagcaaagtggatcgtcaccttgcagtcctgccgcagtgcggaaatgcggaaggtattgccgttctgcagcacggtcgccgcgccctcgggcgtgacggtgtagccggaggcataatagccggtgttggcattggccgtgacggtcatgccccgctgcgtcacggagccgtgctccggcgtgtcggtgtccgccgtcagtgcgtagcggtcgagcagcgcccagccggagttgacatcctgcagcgcatcgacattgccgtggccgggataggtatcatccgcggagacgacgatcgggaatgcggcgcggccgcgctgcgcctcctccagcgtcgtcatctgatagttggcggacatgccgttggcctggcagatctgcggcgagcagtcccatgcgccgcaggccgtcttcatgtccgtgatcgcctcggcgacggtgctgccgccgagcaggctgtcaaagaacacagcctcaaacgtatagtcgccgacaaatgtgaccgactggctgtaaccataaacggcgccgaggccgcggtccatgagcggcttttccaggccgtcggtcgccatgccgaggcagatcgccatccagagcaggccgttgttggcctgcgcgtcggcgtccatgtggtcggcaatgaccgtgccgtccacgaggaaatatttcatgctgccgctcgtgctgctgtaaacggcgtgcccgccgtcataatccgccttggtcaggccgtcgcccgtctgcaggcagaggtaagacgtcgtggcgccggaggtgtagtcctcgccgttttcgtaatctgtcgagccgtgcgagtcgaagaagacaacgccgccgtccgtgatcgcgtccgcaacggcgtcgatcgtcgccgcatcacctttatagtagtgataggtaccctcggacgcctgcgccacgcgctgggcctccttctggtactgctcggtgaagctgcggtcaacgccgtagtacggctggaacaggtacacatcgcgcccgtgctgcgtgccgcgcgcggcgtaggagcgcgtctgcacatcgggcgtatcgtcagccgtgggctccgccgccgccgcgatctgctccagacgcggagaataggcacaggcgatgccctgctccgtcatccagttgatccgttcgccgctcgtctcgaccgagccgggcacgaccgcgtcctgcgcgttgagatagtcgcagatggcctgtgtgcgcccgtctgcggatgcatcccgccgcgccgccgtctgctccacgtcctcgagcgcgttgaacagcgcgtccgcagcggcataatccgccgccgtgagcgccgcgtccgcgccgtcgtcggccgcaaacgccgtcaccgtcagcgacagcaaaacggcgaccgcaaggagcaccgacagcattcgtttgaataattgctgcatgaatgtttcctccaaatgattcgttgcgaagtttaagttagattcatctaatttaaattagagcaatctaactcttgcggaaaagaaaagcgcgctccggcgtatctgcaccgaccgggcgtgcatgatcccgactagctcttcgatgttagatacgtcaaactgccacaaaaaaaagaaaagtgcgccacaaaagcagacacatatccacgcacttggcattatacaatggcgctcacagcgtgtcaagaaaattctcggcgatctgccgcattcgtccagcgcagaaacacgccgcacccgcgatcgggtacggcgtgcaaaatgcggtggtgcgggtcacttgacctcgtcgtccagccagtcggccagcttggcctcgtccaggttcaggcccttggtcaggaacgcgaccatttcgttgaaattgagcttcttcatgcgctcaaagttcgactcgcccttcttctcggggtcgatcaggcggccttcgatatagccgcactcatagcacatattcagcgcatacttccgatgggtatcgagcgtcatttcatgaccgcagcggggacatttcatcacacattctcctctccataaacagcagtttttgatactttatgtaccgtttcctgcgcaatatctagcaatatgctacatgattgtgcgcgaatatgcaagcatagtttacgaattaacacggcgcgtccgccagggtaacggtcagcgtctgcgccagacgcaccgggccgccgatggacagccccgtcaccgcgccgtgggcgcgctgcacgccgacctcgagcgtgccgcccggctggccgatgccgatctccgtaatgccgtcggcaaagtccgccgtgagcacgacggccgtggcgacgctgccggaggcgcagctcgtctccgcgacgcacgagccggtctcacgcacgaacacgaccggctgcatgctgccggccgcccggtcgagaaacagcgcgccgacggcgctcgcctccggcgcggcggcaatggcacgctgcacgagcgcatcgtccggctgcgcgcgatccatgacaaagtgcgtgatgccgtcgaatgtcacgcgcacggcctgcacgtccggccaatcggccggctgcaccgcgcgcggcagcggcatcaccgtggacgcctcccccgccgctgtgtccgccatgaccggctgaacgccttccgccccgctgatctcggcaagaacgcaggttttcccctgcgcgccggtgcgcaacgcgtgataaaaccccgcgcagcgcagggcgttgccgcaaaattcaccgcccatcatctccagccggatctccccgccgcagcgcggcgcggtcagaaaagcggcctgttcaatgcgcagctccggcaggcgcagcagctgtgccgcgatgcgcgcgcgctccgcggccagcacgtccgagagcacgatggccgtgacgttgcccgccggatcgagcaccgcgacttcatattcccgtttcatttctctggtctgcatggcggtcactccgtgaaatggacatggttgttgatgtgatcctggcagaagcagtggtagcccacgcagcgcgagcagtagcgaaactccagctccggatgatccacatccgtgcggccgcagacggcgcatttatagtgataaggcttgtttgcctgctcgcgctggatgcgccgggcctcgcgcttgaagttcaccgttttctgccgctggcgcacgtgcgacgggcggaaaaagtcaaacagccagtcgccgcagtagaccagatagttgagcaccgccaccaccggcagcaggttcagcgggaacgacgtcgtgacgacgccgagcacgaacagcgccgcgtccacatatgccagatacttcactttgatcgggatgatgaaaaacagcagcacctgcatatccggatagagcgtggcaaaggcaaaaaacatcgacaggttcaggtacgtggtcgagacgatcacgtcgcgcccgaggatggccgagagcaccacgccgtagatcgccgtgagcagcatgccgctcacgtaatagatcgtgaatttgccgttgccccactcgcgttcgaggcacgaaccgatccagtagtaaaaatacagcatcaccagcagccagatggggctggcctccgtcggcacgaacacatacgtcaccaggcgccagacctgcccgtgcaggatgccctgcgccgagccgcacaacagcgaggcgatctgcccggtcgtgtccattttcgtcagcagccagacggccgcgttgccgatgacgatgatcagcatcaggttcggaatgccaaaacgcgggtgcgcatagcaaaaccggtcgattttgttcatcagttttctcattgggttcctccgtaaatacaacgtatgtccatgataccttcttaaaaccgcaaagtccataaaaaaatatccggaatcgtaatttgtgctttctaaatgggcgatcgtgtggtatgatgatatctgtattattatgtcgtaaggtataggtatatcatggaacaaatacaggaatttgaaaatgaagcgcgcaacgatctgatcgagggccgcaacgcggtcatggaggccctgcgcgcgggccgtacgatcgacaagatcttcatcgccaagggcgacgtagacaagacgctcgggcacatcgcctcgaaggcgcgcagcgccggcatcgtcgtcacggaggccgaccgccgcaagctcgacgccatgagccagacgcacgcgcatcagggcgtgatcgcgctgtgcgccgtcaaggaatacagcacgatcgaggatatgctcgccatcgcggccgagcgcggcgaggcgccgcttctcgtgctgtgcgacgagatctccgatccgcacaacctcggcgccatcatccgcacggccgagtgcgtcggcgcgcacggcgtcatcatcccaaagcgccgcagcgcgggcctgaccgccgtcgtggacaagacctctgccggcgcgctcgagcacatggccgtcgcgcgtgtgccgaatctcgccgccgcgatcgagacgctcaagaaaaacggtctctggatctacggcactgccgccgagggcgcaaacgagctgtggaaaacggatctgaccggcccggcctgcatcgtcatcgggtcggagggcaccggcatcagccggctggtgcgggaaaagtgtgactttctcgtcagcatcccgctgcgcgggcagatctcctcgctcaacgcatccgcggccgcggccgtgctgctctatgaggcgctgcgccagcggagctgagcgcccgcaccccctacgctattaaaaggagttgaccatatggaccaatttgatcgctcgccagaggacgtttcttttgatctggatgcagaagaatactccctggaatccattctggacgaatataaagattttcagacggacgcgcccgcgccccgcccacagccggcctatcgcagccggcccgtcacggcggaaatgatcgaagaggaagaggccaaggacgctgaggccgaagacattctcatgtccgccgagctcgacagcgcattggaggccgctgccccggaggcagcagcgtccgctgccgatacgcccccgcacgaggatcacgacgtcaagcgctaccagccaaagcgccagcgcgaccacgcgaccgaagaagaggtcgaaaaatggaacgagacgaaggccaatgccaaacgcctggccaaaaaaggcatctcggggctgaagcatttcgcctcgaagctctcggaggtcgtgccggacgagccggtggagccggaggaggagcccccggcggaagacacggcgatccccgtctcccccccgccggaaattccggaggggctatatgaccccgaacccgaaccggaagagccgacgcgcgtgtttcaggccgtgacggaagaaggcatgaacgacagcgcggccggcggcacatcctacgcccgcgccggtgactacgccgcggacgaaggcgcggaccgtcccgcgcaccgcagctttcaggacgcggtgctcaacccgctcatggcgcggctcgccgccgtggcttaccgcatccgggagcacaacagctccgtgcacgcctcggccaatgccgaggaggatctcggcccggagccggacgccgaaaccgccgcaaaatactacggcggacaggtcaaatccctgcgtttccgctgccgggcggccatgctcgtgtgccttccgctgatctacatctcgctcggcctgcctgtgttcggcgtgctcaggagcagcccgtccgtcgcggcgctcgtgtgcctgatgatgcagctgaccgtcatgctcatcggcctggatgtcatcacgaacggctttttcaacctcgtgcgccgcacgccgggactggaatcgctcgtatttctcaactgcgtcttttccgcgctcgatgcggtcgtgctggccatcacaggctcggacgccatcggcctgccgttttgcgccgtgtccgcgtttgccgtggcctgctgcctgtggagcgcgctgaacacctgccgcggcttcaagtccacgttccgcgcgctcgcggtcgacaccgatccctacaccgtcagcgcagacagcgaggtcgtcaaggacagcatcaccgtgctcaagtccaagcgcgacaccgcgggcttcatccaccgcagcgaggaggccggcccggccgacacgatctatgcctcgctcgcgccgtatctgatcgcggcgtccgtcattctcggcctgctcgccacgatcctcagcggtaattatgccaacatcctgcacgtgtttgccgccgtcaccgcgccgtgcgcgccgtttgcggcgctcgtggccttcgccgtcccgttccggaccgccgcgcgcaagctcgcccgcaccggcagcgccatcgccgggtggagcggcgcaagcgatatcggccgcagcaagcacctgatcgtcacggataaggatctgttcactgcgcgcaacatctcgattgaatccatccgcatcctgggcggcgcgttcccgggcaaggtcatcacctatgccggcagcgtgatcgtctcatccggcagctgccttgcccccgtatttaccgatctcatgcagcgcaacgactgcgcgctcatgccgcttgaagatttcgcctgcaacgaaagcggcggcctgaccgccatcatcaacggcgaggaagtgctcgtcggaagctccgcattcatgaacctcaggggcgtgcgcctgacagaggcgcgcagcatgaaagatgccgtctacgtgtcgatcaacggcctgctcgtcggcttttttaagatcaagtatgtaccggtgcagtccgtgcagaacgcactcttcgccctgctgcgcacgaagatcgcgccgatcttcgccgtgcgcgacttcaacatcacaccgctcatgctcgggcagaagttcaagatgtcgaccgacggctttgacttcccggcctaccgcaagcgctatgccatgtcggcagcggaaccgtccgactatacgcagaccgccggcatcgtggcgcgcgacgggctcggcccgctcgtgagcgtcgccgcgctcggccgccagctctactccactgtgcgcatctgcgtcattctcgccctgctgtgcacggtcatcggcgtcgtgctgatgtttgccctgtgcgccatcagcgcgttcgattccgccaccgtcggcaacctcttggtgtacatgggtctgtggctcgttccggtcattttgctgaatttcagcctgaaacgctgagttttcatatttatgattgccaagagttttgaaatcgtgtatacttttatagtcgtgtgtgtgcagcacaccaccatttccggagttaggaattttggatagtctatatataaggagagtacactacatgagctacgaaaccaagaatatccgcaatgtgtgcctgctcggccatggcggcagcggtaagaccacactcgccgagagcatgctgtatatgacgggcgcgatcgaccgtcagggcaagacggccgacggcaacaccgtctgtgattacgatcccgaagagatcaagcgccagatcacgatctcgaccagcatcgcgccggtcaacttcggcggctgcaagatcaacgtgctcgactgcccgggctttttcgacttcgcgggcgacgtgatgtgcgccctgcgcgccgtcgaggccggcataatcttctgcactgcgaaagacggcatcgccgtcggcgctgagcgcagctggaaatacctcaaaaacgccaacatgccctgcatgttctacgtctccaagacgaatgaagatcacggcgattttgccgccgtcctctccgccctgcaggaaaagcacggcagcgccgtctgcgccgtgaccgcgccgatgagcgacggcaccggtgtcatcgatctggtgcacaacgtggcttaccagaccaatggcaacaagaccgcgaaggtcgccgttcccgccgccgacgccgacatggtcgagtcgctgcgcgagacgctctttgagacggccgccggtgcggacgaggaactcatggagaaatacttcgaggacatgatgctctccgaggaggacaccgtcaagggcctgcgtcagggtctgaaggaccgcaccgtgttccccgtgctctgcggcgccgctgacagcggcatcggcaccgaggccgtgctgcaggcgatcgtggattacgtgcccaacccggccgaggtcggtgaggtcgccacggctgacggcggcaagctcgccatcgacccgaacggcccggtgtgcgcgttcgtgttcaagaccatttccgaccagttcggcaagtactccttcatcaaggtgctctccggcaaggtcacgtccgatctgtctctgcgcaacgtgcgcatgagcagcaccgataagctcggccgcatgtacaccatgtgcggcaagaagaacaccgaggtcaaggaagcctgctgcggcgacatcgtggccatcggcaagatggagtggaaaaccggcgacaccgtctgcgacccgaagcacgaggtcgagctgcccgccatcgagctggcagagccctgctactccatggccatcagccccaagaccaagggccaggacgacaaggttgcttccggcctcgcccgcctgaacgaggaggacatctccttcacgctcgtcaacaacgccgagacccaccagatggtcatctccggcgccggcgacattcaggtcgacgtcctgtgcgccaagctcaagagccgcttcggcgtcgagaccgagctcaagcccgcccgcgtcgcttaccgtgagaagatcaagggcaaggtcgaggcccacggccgccacaagaagcagtccggcggcagcggccagttcggcgacgtctggatccgctttgagcctcaggacgagtccgatgacatgatctttgaagaagaagtctttggcggcagcgtgccgaaaaacttcttcccgtccgtcgaaaagggcctgcgcaacgccgtgcagaagggcgtgctcgccggctacccgctcgtcggcctgaaggccgtgctgtacgacggctcctaccacccggtcgactccaacgatatggcgttccagacggctgcccgcctggcctatcaggacggcattccgaaggcgaagccgaccattcttgagccgatcggcctgctgaaagtcaccatcccggacgccaatctgggcgacatcatgtccgacatctcctccaagcgccgcggcaccgtgctcggcatgacggcggaggacggcatgcagaccgtcgaggcggaagtcccgatggccgagatgggctcctacacgatcgacctgcgctccatgacgcagggccgcggctccttctcgtgcaagttcgtgcgctatgaggaagctcccggcaacgtccagcagaaggtcatcgaggaagccaagaaagaacaggaagcgtaactgtaactgcaaaaggagcccttcatcgggcttcttttgtctatccggaagcgaggaatcccgatgaaaaacacgaacaaaaacatgatgtacaccttctggtcaggcgctattttgctgtgtctggcgctggtggccgtcgtgctggtgtttaccaacgccgttggcaataccggctcgccgaaggtggaagccacaccggccgtcaccgaaacgccgacgccgacgccgcaggcaaatccgatctcgcccatccagtcgtccgccgcgctcgcgcagacggaggacaagggcagcacctatgtcgaccagatctatttcctgggcgacaagtcgctgaaggtgctgcagtcggagtcgatgctcaccggcaaggacgccgccaagcaggtctggataccagacaccggttctctgcccgcctcctcgctcgacacggcaaagtacaagtcccccgtgaccggcaacaatgtgcccgcggatgagatctgcgaggtcaacaagcccgcctatctcgtcatctgcccgagcgcggacaacatttccatgacgaatgaggagcagatcaaatccgtctacaccacgctcatcaacgccgtcaaggccaagagcccggacacgaagatcatctgctgctcgctgacgccgatcgcgtcgaactaccagtacgaggacatcacgaacgagctcatccagaaggtcaacggctggatcgccgcggccgcggagagcaacagcgtgaagtatctcgacatggccagcggcctcgtcggggacgacggattcctgccgcagtcctatcaggacggcgacggcatgcacctgaacgccgagggcatgaaggcatggatgacctatctgcgcacgcacgcttacccgtaacctatgtatagaaaaatcccggagcagcagctccgggatttttgttgtcttcagcgaatgattgccttgatgaacggctccgccgggggcgcgtccggggtgatcgtgtagcaggcggcgagctctgcgaccgccctgcgggcggctgcctcatcggccgcgtggatcgtcgcaagcgactcccctgccgtgaccggctcgtccaccttcttgcgcaggacaatgccgacgctgtggtcgatcacgctgtccttcgtcgcacggccgccgccgaggcgcatggacacgaggcccacgtccgtcgctgcgatgtggcgcacatagccgctcgccggggacggcacctccatctgcaccggcgccatgggcaggcgcgacgggtcatagatcgcggccggatcgccgtcctgcgccgcgacaaactcggccagctttttgagcgccgaaccgtccgtgatcgtctgctccagcatggcgcgggccgccgcatcgtcggccgccatgcccgcctgcgtgaggatgcagctgccgagcgtcaggcacagctcgagcagctcgctcttgtattccccgcgcagcgccgcgatggcctccttaacctcaagcgcgttgccgacggcgtggccgagcggctcgtccatgtccgtgatgacggcgaccgtcttgcggccggccattttgccgatctcgaccatctcggtcgcaagctcgcgcgcgtcgtcaagcgtcttcataaatgaaccactgccgcacttgacgtccagcacgatgatatccgcgccggcggccagcttcttggacatgatgctgctgacgatgagcggaatgctcgccacggtgccggtcacgtcgcgcagggcatagagcttcttgtccgcggggtcgaggttcgccgtctgaccggcgatgaccatgccgacgcggtccacattctccagaaaccgctccatgggcaggttgatgttgaagcccggaatgctctcgagcttgtcaagcgtgccgcccgtgtggccgaggccgcggccggacatcttcgccatcttcacgccgaggctcgccaccatcggcacgagcacgagcgaggtcttgtcacccacgccgccggtcgagtgtttgtccgccttgacgccggacacacccgatagatccagcgtctcgccgctgtgcatcatggccatggtcagatccagcgtctcgcgccggtccatgccgcggaaatagatggccatcgtcatggcggacatctgataatccgggatctcaccgcggctgtagccgtcgatcatataacggatctcctccgtcgtgagggcctgcccgtcgcgctttttcacgatcagatcgctcattctcatcgccgatatgctcctttgtgtttttcttgccatgagtataccacgccggcgccggaattgcaattcagcgcggaaaaatgaggtatggccggccgtcgatctcgcgcagcacggtctcggcgccacgcggcagatttggcgtgtccgccgggatggcaatgagcatccgcttgccgtcaaatgtggtcagcacgccgtccggcgcagaataccagagcacgtcaagcccgtcgtccggcgcggacttttgtgcctgcggcggagcgggagccctggccggtgcgtccggaatgtcccatgtctcgtcggccgcaaacaggatcggatccggcaggcgcgcgcgctcgagccgcgtgagccgcttgcgcagcgtgagccatccgctcccgtccggcagcatcaggccgagatacgcgcgcgcctgctcgccgcacacggcgagccgcaggcggtcggcatccgcctttgcccgcgcggaaaacactgtgaagagcccggcctgcgtcacggtcaacgtgccgatgggcttgttttgctgcaggatcggataatcaggcataaaaaatcactcccgcaccagactatgcgcgggagtgatggatttagaaccagagtcagccgacgctgtagccgccgcgcaccatgacggtggtgtcggcggtcgcctgaatgccggcgccgtcggcctgcacgaggtacaggtgattttccgtcagctttgccccaacggcggcgctctctccggtcgtgaggtcaatggcggcgctctgcgtcacggcggcagtgcccgtgcgcatgaggagctccgtgccggcgcggccggtgagcgtctggccgctttcgagcgtcacgagcacatacgacccgcccgcagcggcgacctggtcggcaaactgatcttccatctcgcggacttccccgtcgagcgtggagcggtaggcgtcctccatgcgcggctgcaccacatcctgcaggtagctggatgtgacgagcgggtcttcctttgtgccgtagtttgcgacggcatacacggtcacggcggcgaccatggcgagcgcgacgatgaggatgatggtggtcagtgtctttttcttcataaccgtccctccgtttggtggcgtgggtgtttactgcggcaggccaaaactcacggcgatcgcgttgtccacctggtgcatcgcaggctcgtccaagcggcccatgcgctcgcgcaggcgcgacttatcgagcgtgcgcacctgctcgagcagaatcacactgtcgcgcgtcaggccgcagctgcgcgctgcgagcgagatgtgcgtgggcaggttggccttgccggtctgcgacgtgatcgcggcggcgatcaccgtcgggctgtggcggttgccggtgtcgttttgaatgatgagcacggggcgcataccgccctgctcgctgccgaccaccggactgaggtcggcataatagatatctccgcgtcgaactggatgcatagctttcatctccgatggaatatttgccccggtcgatatgtaggggcacagttattttcgccatcggagcaaaatttatacttcagtcgatgtacacgcgctgcacgcgctgactcatggcacacagcagctcatacgggatggtgccggccttgtccgcctgctcggccaccgagaggtcacggccaaagatcgtggccacatcgccgggctgcacctcggggatgtccgtgacgtcgaccatgcacatatccatgcagatgcggccgacctgcggcgcgcgctgaccgtgcagcagcacgtcgcccttgccggagaggctgcgcagcagcccgtcggcataaccgaccggcagcacggccaggcgcatatcccgcgggcaggtgaacgtgcggccgtagctgatcgtgtcgcccttgtggtgatgcgtcacatcggacacgcggctgtagagcgacatggccgggcgcaggtcgagcccggcggtctctttggccgggaacacgccgtagagcagcaggccggggcgcaccatgtcgaggtgcatctctggatagttgatgacggcgccgctgttggcgcaatggcggatggcgaaatggtggccggtcgcctgctccatgcgctcgatcgcgtgcgtaaagcgcgaaaactgcagctgcgtgtacgggtcgccgttttcgtccgagacggcaaagtgcgtgaacacgcccgtgaagttcaggtgcggcagcgagagcgcctcgatcatctcgtcgaggtggctgtcatcatgcacgtcaaagcccgtgcggcccatgccggtctcgagcttcatgtgcgcgtccagccgcaggccggtgccggcgagaaagcggttgagctcgcgcgcatattcgatgctgccgaccgcctgcgtcacgccgagcgtggccagatcgaccgcgatattcgccgactgcgggccgagcagcaggatgttcatcgtcacgccggcggcgcgcagctcctcggcctcgtcatagcagttgacggccacccactggcagcccgcccgctgcagccgctgcgccacgcgcaccgcgccgtggccgtaggcattggccttgcagacgccgagcatctggcagccgtccggcaggcggctgctgatctcacgataattgtgttccagatcattgagactgatctctacccaggttcggatcttgcgattcatcgttcatacttccttgttccagattccagttttccatggtgcagcgcagacagagcgtgtcatcgaccgacagctccgcgcactgcggtaccgtgccgtccagatacagacgcacggcggtatgatcgtccgtgatgagctgcacgacctgcagcccgtcctccgtccacgtcaggtcgacatagccgctgcggatggcctgcaccacatagggcagcgccgtcagcggcgtcagacccgcgccgttgaggtcgcccgccgggaggataatgtcatcaaaggcgagcgcgctcgccccgtcgcgcagatgggccgtgacaccggccgcctgctccggcgccgtgaccgtgaggtcatagccgtccggcagctcctgacaggtgagcgtgtagtccgtgaccgtgtcgccgcgctggacgcgcacctgcgccgtcacggtgacgagcttgcccgtgagcgtgtcacgaaaggcttcaaacgtctgttctcccgcgccgtgtccgcacgcggacaacagcagcaggcttatcatcagtgcagcgatcgctttgcgctgcatactgcctcctatcggatgatgggttttgtgacctccggcagggccgcgatcacatcggtcgggttcatcgcatattcgcccatgcgcccggcgcagagatcacccgcccggccgtgcagccagacggcggtctgcaccgcgtcgcgcgcgggcatctggcacagcagcgcaccgagcatacccgccaatacatcgccgctgccgcccttggccataccggggttgccaacgcgcagcaccgccgcgtccccgtcggggaatgcgcagaccgtctccggccctttgcgcacgaccgtgcagccgtgccggacggcaaaatcggacgccgcctccgccctgccggttttatccggcccggccagacgggcaaactccccatcgtgcggcgtgagcacgatgggcgcgcgggcgcgctcgagcaccgccgcgtcctgcgcgacggcaaagagcgcgtcggcatcgagcacgagcggtgtgccggactgcataacgaccgcctgcaccagcgccgtgagcgtgtcattccggccgaggcccggcccgagcacgcacacatcgctcttttccagccgctcgagcagcaccggcagggcgtcgcgcgcgagcttcccctccgccgacggcagcggaaacggcatcgcctcgtcgtttttcacggcggtgacggcatagatcgcctccggcacgccgacggacaccagcccggcgccgcagcgcagggccgcccgggcgcacagcgtcggcgcgccggtatagccgatgcagccgccgacgatgagcacacggccgtagtcatatttgttggtatcggacgcacgccgcggcaaatacggcgcgcagggtgcaatgcgatgcatagcttgcctcccggacggaaaaggggtgatttttctccgattattataacgttttcggcgcgccgcgtcaaattttcttccccttttacattgatttgtgctgcaaagtgtggtataaatagctttgttattgagtttattgcttggatcgggaaaatagcaccaaggttccgcgccagagagggacgccgccggctgagagcgccctgcgagaaacgtgctttgttcgcccgtgagctccggccaatccccggcgggtccgcccgttaccgcgcacagagtgcggcgcgcacgcgccgaattcgggtggtaccgcggaagtttcctttcgtccctgtatgcgggacgggaggatctttttttgtccgcgatccagcaaggaacgcaacgaaccacgaaaatcttgcaacggaggagttgtttgcatgaaagaaatgctgcagaagctgcgcgaggcttccgtcgccgccattttgcaggcggacgacatcaccgcgctggaaaacctgcgcgtgaagtacctcggcaaaaagggtgagctgaccgccatcctcaagcagatgggccgcctgtcggcggaggagcgcccggccatgggccagctggcaaaccaggtgcgcgccgagcttgaggaagcgctcgaccagcgccgcgaggcgctcaacgcccgcatgctcgagatgcgcctcaaggccgagacgctcgatgtgaccatgcccggaaaagcgccggagctcggccaccagcacccgatgtatatcgtgctcgatgagattaaggacatcttcgtcggcatgggcttcgagatcctcgaaggccccgagatcgaagaggccgaatacaacttcaccaagctcaacaccagcgagggccaccctgcccgcgagtggtcggacacgttctatctgaccgaggacagcagcatcctcctgcgcacgcagacctccccgatgcaggtgcgcgccatggagagcaagccgctgccgatccgcatggtcgcccctggccgcgtctaccgcaaggatgaggtggacgccacgcactcgcccatgttccaccagatcgagggcatggtcatcgacaagggcgtcacgatggcggacctgaagggcacgctcaacacgctcgtgaaaaagctctacggtgagaacaccgtcacccgcttccgtccgcaccacttcccgttcacagagccgagctgcgagatggacgtgcagtgccacaagtgcggcggcaagggctgccccacctgcaagggtgagggctggatcgagatcctcggcgccggcatgatccatccgaaggtgctcgagggctgcggcatcgacacggacgtctactccggctgggccttcggtatgggcctggagcgtctggcgatgcgccggttcaagatcagcgacctgcgtctgatcttcgaaaacgacgtgcgcttcctgcagcagttctgagaaaggagaggctaccatgattttaagcagaaaatggctcaatgaattcgtagactgctcggcctgggccgaccacgacttttccgaggcaatgaccctctccggctccaaagtggaaacgttcacggacctgcacaagaacattcagaatgttgtcgcgggccgcatcgtggagatggtgcgccacacgaactccgaccatatgtgggtctgccaggtcgatgtcggcggcagcgaaccgctgcagatcgtgaccggcgcgcagaaccagaaggtcggcgacatggtgcccgtcgcgctcgacggctcgctcctgcccgacggcaaggagatccatgccggtatgctgcgcggtgagctctccaacggcatgatgtgctcgctcaaggagctcggcctgacgctgcatgactacccctatgccatcgaggatggcctgtgggtcatgcaggaggacggcgtgaagcccggcgacgacattgccgccgtcatcggcatggacgaccacgtggtcgagtttgagatcacgccgaaccgcccggactgcctgtccgtgatcggtctggcgcgcgaggccgccgtgacgtttgacaagcccctccgcctgcacacgcccgacgtccccggcagcggcgaggacatccacgaccacgtcagcatccgcatcgacgatccggcgctctgcccgcgctacaccgcgcgcatggtgcgcaacgtcaagatcgcgccgtccccggcgtggatgcgcgagcgcctgcgtaacagcggcgtgcgcccgatcaacaacatcgttgacattaccaactacgtcatgctcgaatacggccagcccatgcacgccttcgacttctcgtgcatcggcggcaagcagatcatcgtgcgcaccgcgcgcgagggcgagaccatccagacgctcgacggcaacgcgcgtaagctcacgccgaacatgctgtgcatctgcgacgaggaaaagcccgtcgcggtggccggcgtcatgggcggcgccaactccgagatcgttggcgacacggccatggtcgtctttgagggcgcaaacttcaacggtacgagcatccgccgcacggccgccgcgctcggtatgcgcacggaggcctccggccgctttgagaagggcctcgacccgatgaacaccgtcgcggccgttgaccgcgcgtgcgaactcgtggagctgctcggctgcggcgaggtgatgcgcggcaccatcgacgtgctgcccgagcccatcgtgcccaagaccgtgaagctcgagccggacaaggtcaacggcctgctcggcacggacgtgtccgaggcggagatgcgccgcatcctgctcgcgctcggcttcgagctcgacggcgacacgatcatcgtcccgtcctggcgcggcgacgtggagcactactccgacatcgccgaagagattgcccgcttctacggctacaacaacatcccctgcacgctcatgcgcggccagaccaccagcggcggctacaccgacgcgcagaaggcggagcgcagcatcggcaccatggcccgcgcgctcggctacagcgagatcatcacctactcgttcatcagcccgtcgtactatgacaagatccgtctgccggcggactccccgctgcgcgactccatgaagatcctcaaccccctcggcgaggacacctccatcatgcgcacgaccatcctgccgtccatgctcgagatcctcacgcgcaactataactaccgcaacaaggccgtgcgtctctatgagatcggcaaggtctacttcgcccgcccggacggcatggccgacgagccgaagctgctgtgcctcggcggctacggcggcggcatggacttcttccagctcaagggcgcggtcgagcgcatcctcgccggtctgcgcatcacggacgtgacgtttgaggcggagcacgacaatccgtcctatcaccccggccgctgcgcgaaggtctatgccggcggcaagctgctgggcgtgctcggccagatccatccgctcgccgcggcgaactacggcgtggacgcggagctctacacggcggagctgtggctcggcgaactgctcgccgcccgcggcgcgaccccggtctacacgccgctgccgcgcttcccggccgtgacgcgcgacatcgccatcgtctgcgccgccgatatcccggtcgccaagctctcggcgtgcatcctcgccgccggtgggcagtacctcaagggctgcgagctgttcgacgtgtacaccggcgcgccgatcccggtcggctacaagagcgttgccttctcgctgacgctgcgcgccgacgaccagacgctcaccgacgaccacgccgaggagaccatgcagagcgttctcaaggcgctcaaggagactttcaacgcgaccatccgctgagcggcgtcgagatttggaatattttaagaaatatttcagaactttttttgaaaacagttgggaaattgactttacagtcttgtgttttttggtataatgaacacaagaacttgtgtaagggagggcttcacatggaagacgcaaccagacggtttaatgcgatcgacaacaaaacagaaatgaaggagatcctcacttccgtgtatcattcccttgttgtcaaagggtacaaccccatcaaccagctcgtcggctacatcctctccgaggacccgacgtacatcaccaactacaacaacgcccgcagcctcatctgccgtcttgaccgcgacgagctgctgcaggagctgctgaccagttatctggacaaataagcagcgcacgaaacgaaaaaagcctctgccggccggcagaggctttttctatacacagataacgcatccgcacgcaccagacgcgcaaccgcagctctttcgattgcgatgaggctggtgtccgtctcatagcgcgcgtcatgatgagatcgagcgccgactgcgcgccggtgggcaccagctccgttccggtgatgaccgcgacggttttcccgtcctgcacacaggattccacctgcatagcgaattctctccttgcattgtgggataaaaaaacgcccttgtcagtgacaagggcgtttctgttggcagcggaagaaggattcgaaccctcacaaacggagtcagagtccggtgtgctaccattacacaattccgctacgaacaaatgatattatacagatatttttggatttgtcaaccccctgccgcatatttttcacgaaatgaaaaacagcccgttggccctgcctgctcacgcaggcagggccgggaaaccgggctcagcggtcgaggatcttgccgtcgatcgagatcgtgacgacctgccatggcaggaactttccgctcgcgcgcagcgcctcccgcgccgcgtgctcgagcccgccgcagcacggcacctccatgcgcacgatggtcacgctctgaatgtcgttgccccggatgatctccgtgagcttgtcggtgtaatccaccgcatcgagcttcgggcagccgatgagcgtgatcttccctttcatgaactcactgtgcatgttcgcgtaggcatacgccgtgcagtcggccgcaatgagcagcttcgcgccctgaaagtacggcgcgttgaccggcacgagcttgatctggcacggccactggccgagctgcgacggctgtgccgccggcgtcgctgccgcggccggctcttcacactggaagcgatgcatctggtggccggggcagccgccggcgtgcgcggcatgtgcggcctgcacctgctttttgcgcttgttggcctgcacggccgcctcgtcatacgccgccgcttcgcgctcgacaaaatggatggcatccatcgggcaggcgggcaggcagtcgccgaaaccatcgcagtaatcgtcgcgcaggagcttggccttgccgttcacgatgccgatagccccctcgtggcaggccgtcgcgcacgcgccgcagccgttgcacttttcttcgtcaatgtggatgatcttacggatcataatatcccttccctttccaaaaatcgtccgggcccccgcccggcggtcttgactttctgtgcataagatagcataataagacccacaaatccgttgtcagaacaacaaatggagcaaaaaaatgaacatcatgctatccaacacgcgcctctttcgcggcattggcagcgatgaactgccgctgctgctgcaatgtctcggcgcggcacaaaagcattacgaccggggcgagaccattctcgccgagggcacgccgaccgagcagctcggcatggtgctcaccggcatggccatgatcggctacgacgacgtctggggcagccacagtctgctcggccacgtcggcccgggcgaagtgtttgccgagccctatgcctgcatcccgggcgagccgctgctcatcagcgtgaccgcttcggaggacaccgaggtgctgtttttgaacatcggcaaggtgctcacgacgtgcacgaacgcctgcccgtttcacgccaagctcattcaaaacctgctgaccgtgtgcgcggccaagaacctgcagctctcgcagcgcatcctgcacacaacgccgaagggcatccgcgcccgactcatgtcgtacttttccgagtgcgtcaagcgcgccggacagtacagctttgacattccctacaaccgccagcagctagccgactatctgggcgtggaccgcagcgccatgtgcagcgagctgtcgcggatgcagcgcgaggggctgctgacctaccacaagaaccatttttccgtgcacgaagcactggagtaaatcgacgaaaggcggacacaacatgacgagagaagaatacgcaaagcggatgaaaaagcaccccgactgggcccccggccgggacgcgatcgaggcggcctttgccaggcgctaccccaaaacggagccggtgtgcttcgagagcgagctgcacgaccgcgcggccttcggcggcgacgaatatctcgacggcttcgccgtctacgacacgggcaagggctatcagcacatcgtcacctacggcatgagcgagctgtacccgagcatggcggccttcggcaccgagtacagcaaatggggctatgaaatgaccatgaaggtgcgcgagagctatgccgagaccggcacgtgggcgctcgacctgctggcccagctggcgcgctacacgtatcagaccggcaatttcttcgagccgggcgcgtacatccccggcgacggcagctccctgcacccggagctgaactcggccatcacggggctggccatcgtcagcgacacgaccgtcgccccgatcgagacggtgcacggaagagttgcgtttttgcagctcgtcggtctcacgcagccggagctggacgcgctcgcgcgtgacccggatgcgctggacggcattctcgagcggatgcgcgcggacgatcccgagctggtgctcgacatgcgcagaacgaagtcctacgtataaaaacagccgcaccgtggcctcacggtgcggctgtttggttatcttgctttggatcagttgcctttcttcgcgatcagctccgcgcaggcttcgccgaggatgcggatgcccttttcgatgacctcgtcgctgctgttggagtaattgatgcggaacgtgctgacgttgcgttccttttcatagaacgggtcgcccgggcagatggcaacgcccctggcgagcgcgacgcggtaaaggtcgaccgcggacatgccgttcggcagcttggcccacaggaacatgccgccctccgtcggcgtgaactccacgccctccgggagatacttgcgcatgcagtccatcatcagctccgctttgtgcttgtagagcaccttcgtcttctcgatgtgcgcgtcaatgtcgttgtcagcgaggtactgcgccagaacgagctgcgagaagatgttggtgtgcaggtcggcagtcgccttgtagctcaggagcttttcgcgcagcgccttgttgcgcacgcacacccagccgatgcgcataccgggggcaacgatcttggaaaacgtgccgagcatgcagcactgctcgcccagctccttgccgaagctgtcggtcgcagtgccggaaaagcgcagctcacggtacgggttgtcctccagcacgacgatgtccgtgcccttgaagatctccacaacgcggtcatgcacttccttgctgtagctcaggccggtggggttctggaagttcgggatgacgtaggcaaatttcacgtccgggttggcctgcacggtcgccgccagctcgtcgcagtcgatgccgtcggggttgatggtcacgggcaggacctcgggatcgaagaagtggaacgactgcagcgcgacgagataggtcgggttctcgacgatgatcttgtcgccagggtcgagcatgcacgcgccgatcatcgtcagcacctgctgcgagccgttggtgatgataatgtcgtcggccgtcacaccgtagacgcccatcgtctcatagcgcttggcgacccactcgcgcagcggcagatagccctgcgtgccgctgtactgcagcgccatgacgccgtttttctccagcactttgtgcgtagccttgtccatcgcctcgaccgggaacgagaccgggttcggcagaccgcccgcgaaagagatcaggtcaggcgacgccgctgccgcaagaatgcttgccgtaaactcgccctgaaagtcgggacgcaggattttggtggaaagtctgggattcataatgatttctcctttcatgggcacttgtagtggtctgtgtattcgacaggcaagccctcatagtgtgtcgattatagcgcacacgatcgccggattacaaggcgtaccggaaaaatctgcgttctaacggaaaggcacacacatacaaagtgcggttctgtatagaacgctcattcgcgcttaccgttatgcgtcaaatatgcgtcatttctgcattttgcaaccatatgacgctagaatttcgccaatacttcgtcacggagggacgacaaaatgaaagacaacctgagccgatacacgctgcgcatcgaccagacgctattggataagctcggctacatcgcggaatacgagggccggacaaaaaaccgcgaactcgagcagatgatcaaaattcagttctgtttcggctgtacgaattcccgccgcagaatcgctccgcagcggggatttgttataagctgaaatagccgaaagcccctgatctcaagcggttttcaggcatggaaaaagtccaccgtgatccaaaatcacggtggactcatggcggagagtaagggattcgaacccctgtggcgttgccgcctaacggttttcaagaccgccccgttatgaccgcttcggtaactctccagatatgcagatagagaaacaagacgccgatgaccggcgtcttgtttttggcggagaaggagggatttgaaccctcgcgccgcttatcacagcctactcccttagcaggggagccccttcggccacttgggtacttctccaagccgaattccactttccatatggacgtgcggccagcgcgctgcattatagtagcatattcggcagcggatgtcaacttgttttttggttgacaccgcgcgcaaaatgcgttataagtgtgccagaacaaaggagatacgtctatgcactacacatccgtactttttgacctcgacggcacgctgctcgacacgctcggcgacctgaccgccgccatgaaccgcacgctcacccgccacggtctgccggagcgcacgcggcagcagatgcgcaccgcgctcggcaacggggcgcggcggctgatggagctgtccgttccgtcgggcacggacagcgcgctgttcgagacgctgctggcggaatacaacgccgactatgccgcccactgccgcattgagaccgccccctaccccggcgtcgccgcgctgctgcgcacgctgcacacgcaggggcgcaagctcgccatcgtgtccaacaagccggacgaggccgtgcgcgcactgcgtgcggatttcttcgccgacgcagtccagatcgctgtcggcgagacggcagccatccggcgcaagccggcgccggacatgctgctggccgccatggaacagctcggcgccgaccctgacaagacggtctttgtcggcgattccgaggtcgatattgccacggcgcgcgcagcagatctgccgtgcatcagcgtgctgtggggctttcgtgaccgggacgtgctcgagcgcgccggcgcgcagcagttcgccgccgacatcgcgcagctgcaggcgcttctgggctgaaaaaatccgctgggatcaaccagcggattttttatgccatcctgcggcgcagaaacttcagcttcgtctccgagatgaggatggcaacgaggatcagcgcgaagccaacgatcacgcgcggctccagatgctcgtgatagaacgcaacggaaaacagcgtgccgaacacgctctcgagcgtaagcagcagcgccgccgtcgtgggcggggtgtacttctgcccgaatgtctggagcagaaagcacaggccggtgcacatgacgcacaggtagccaagacgcagccacacatccgccgggatctcctccggcgcaggcgcggcgaacggcgccgtgacccagctgagcacggctgccacagcaaactgcacgaacgagagcagcaccgggctgcgccctctggccgcactggcggtggcgatgatgtgcagcgcgtaaaacacgccgctgaggatcgtcagcccctcgccgcggccgatgcgcaggtcgctctgcagggacacgagccccatgccgcccaggcacaaaagcaccgccgcgaggttgtaccggtccggccgccgcttatggatcagccaccagaaaaacggcacgaacacgcagtacgtcgccgtgagaaaggcgtttttccccggcgtggtgtgcacgaggccatacgtctgaagggtgtaggccaggtacaggcacacgcccatgcacgccccaccggtgagatagccgcggtcgagccggcgcaggctccggataccgatgagcgccatgagcatggccgcaccggaaaagcggatggccagcagccacagcgcggggacggtggcaagtgcgtccttcatgatcgtgaacgagctgccccagaggagcgtcgtcacgatcagggcgaagcggccgagacgggtataagcatggcttgcgccggggtcaggcatagagatcagggttcctttttcatgaattgtccggccgcgcgcatcatgaggcgcttggtgccggcggtctcaaattccacctcgagcagcgcatcgccgcccataggctggatcttcgagacgacgccggagccgaacgcgcggtgcgtgacccggtcgccgacggcgaaggccggggcagctttgcccgccggctttgccgcgggcggcgcgggccgcacgggcggcttgcgccgcggttccggcgcggagaccgtataggcacgcggcgcgctctggcgcggcgggtactgctgctggtcgcggctgggctcggaataaccgtagccgcgcgggacgttgagcttctgaatatcttcctccgggatctcctcaacgaaacgggagacgcgattggccgtcgtgcggccgaagagcatgcgctggcgggcgcacgtgaggatgaggtgctcgcgcgcgcgggtgagcgcgacgtagcacaggcggcgctcctcctccatttcatccggctcgccgatgcagcgcaggccggggaaaatgccctcctcgcagccgacgatgaacaccgtcggaaactccaggcccttggccgcgtgcatggtcatgagcgtgacgcagtccatggactggtcgtagttatcgaggtcggtatagagcgcgacctcgtcgaggaagcccgcgagcgtggggttatcggcctccttggcgaaggcaatgatgttcgacttgagctcctgcacgttctcgatgcgggcggcgtcctcggccgtgttcttttcctcgagcgcgcggacatagccgctgcgctccacgacgaggtcgtagagttcgtccggcggcatggttttggccgcggcctgcagctcctcgatcaggatggcaaactggcgcaggcgcatctggctgcgctgcagctcgggataggcgtccgcgtggcggatgacttcaaagaggctcgtctgctgctcatgtgcgagctgcgcggccgtttcgaccgtgcgcgcgccgatgccgcgggccggggtgttgatgatgcgcgtcagacgcaggtcgtcgcccggcgtctggatgacgcacaggtaggccagcatgtccttgacctccgcgcggtcgaaaaagcgcgtgccgccgatgatgcggtacgggatgccgttgcgcttgaaggcatattcgagctggttgctctgcgcgttcatgcggtagagcacggcgtgatcgcggaagttcatgccgtggccaaagtcgtccatgatcttcgtggcgacatagcgcgcctcgtcgttctcatttgtggcgcagtagagcgtgagcgggtcaccggcttcggccttcgtccagagcgttttgcccttgcggccggtgttgttggcgataacgtggttggcagcgtcgaggatgcggccggtgctgcggtagttctgctcgaggcggatggtgcgggcattcttgtactgcttttcaaagttgagaatgttctcgatcgtcgcgccgcggaacttataaatgctctggtcatcgtcgccgacgacacagatattgccccagccgtcggccagcagggccgcgagctggtactgaaggttattcgtgtcctgatactcgtcgatgagcacgtagcggaagcggcgctgccagtgctcgcgcacgtcctcgtgctcgtcgagcaggcggacggtgttgtagatcaggtcgtcaaaatccatcgccccggcggaaaacaggcgctgccagtaggtctggtacacctcgccgatgcggatgctgcgcgggttgtgcgtcgcctgcgcgcgcgccagatactgctcaggcgtgatgccggaatccttggcgcggctgatctccgtgagcacggcgcggtacggaaacgccttctcgtcgagattcatctccttgagaatgcgcttgacgaccgcctgactgtccgacgtgtcatagatcgtgaagctgttgggatagccgagcttgtcggcgtcccgccgcaggatgcgcacgcacgcggagtggaacgtcgaggcccagatgtccgccgcggcctcggggccgagcatgcgctcgatgcggtccttgagctcgtcggccgccttgttcgtgaacgtgatggcgatgatgcgccacggctcgaccggctcgagcgccgccgcccgctgcgcgcgccggcgctcgtccggcgtcagatccgtgcgctcgagcagcgcgaggtccgcctctgtcgccgtgtccggcacctcgtctgtgtccgacccgcggccgtactggatgagatttgcgatccggtggatgagcaccgtagttttaccgctgccggcgccggccagcagcagcagtgggccttccgtggccaggaccgcttttctctgcatatcgttcaggtttgcgaagtccgcctcgatgaagcgtctgcgcgcctgcacatagcgttgttcaaaagtcatggtagtattcatagcgtttgattttaacacattttcccccgggaaacaaggcccgcatcttccaacgcggagattgacaaccacagggtgcggaagtaaaataaagaaaaaattcgatgatcgaggtgcatcttatggacatcatctggcatggccactcctgctttgagctggtctccggcggctacagcgccgtcatcgacccgtttcaggacaccagcgtcggcacggcctatccccacgtgcggctgacggcggacgccgtctatttcagccacgaggaccgcgaccacaacttccgcgagggcgtcacgctgcgcaacaccggcaaggcgaacccgtttgccgtcacggagctggagacgtaccacgatatcatgcgcggccgtctgcgcggcatgaacaccgtgcgcatcttcgccgccgagggtatgcgcgtggcgcatctgggcgatctgggcgcgaagcccacgcccgagcagatgcagcagctgcagtggctcgacgcgatgatgatccccgtcggcggcatctacacgatcgagccggacaccgcctactacctctgcgagcagctgcagccgcgcgtcatcatcccgatgcactttcaggcgcccggccacagcaatcaccgcatgcgcgcgccggaggacttcaccggcatcttcgagggcaacggcgcaaatgtccagcgctacgacaccaaccgtatgacgctcacgccggacacaccggcgcaggtcgtcatcttccgccgcccggaataaaacacgatacgacaaagccgccgctccccatcagggagcggcggctgttctttccgcaattatttcagaatgtccttcagctcatgcataccatggttggtagtgacgacgaccacgcggtcgccgagctcgatggcgtcgttgccggacgggacgcggcacttgccgcggcggatgatcgaggcgacgagcacggagtccttgagcttgagcgccttgagcggcacatcgagaaactggctctcggcgcgcacgatgaattccagcgcctcagcctgcccgtcggccaccatgcgcagcgtctccacgccgctgctgtgcgcggagttctgcatccagcggacgtactccacgatgcggccggccgtcacgtccgccggctgaatgatcgtcgtcaggccatacgattccgcgagttcgatgaagttatcctcatccacctttgtgacgatcttcggcacctgctcgtgataggcaaaggaggagatgatgaggttcgtctcgtccgactccgtgagcgtgacgagcgcgtccgcctccggcaggccctcctcgcgcagaacgtccggctttgtgccgtcggcgcagatgatggtcgcctccggcaggagcgttttcatgacgcggcagcgggccgggtcgcgctcgatgatcgtcgagtggatgtgcatacgcgccagctccagcgccagccgctcggcaatgcggccgccgccgatgatgatgacgctctcggcctcgtggcggaactcgccgatcttgcgaaacagctcatgcagctcgtgcggcgcgccgaccacggtgacatagtcgccggcggcgagcacaaagtcgccgttcgggatcgtaacgctgccctcgcgctccacggcgcagatgaggatgccgtcgctgtagcggccgcggaaatcgttcaggcgcaggccgtcgagcttgctgccctcgcgcagcttgaactccacgagctccacaaggccgttggcaaacggctcgaccttcgtggcggccgggaaacgcagcgtgcgcgagatctccttggcggaggtgcgctcggggttgatggacagactcagccccagctcgtcctgcagcagcgccacgtcctgataatactcctcgtcgcgcacgcgcgcgatcgtatgcgtagcgccgagcttgcgcccgaccatgcagctgatgaggttcgtctcgtccgaggtcgtcgcggcgatgagcaggtcggcgtccgcaacgttggcaatgcgcagctgatccacattcgcgcggccctcgaccacgatcacatccagcgtggaagagatataggcagcgcgctccgggtcactctcgacgacggtgatgtcatgcccttctgtcaggagctgctccgcaatggcatagcccacgcggccagcgcctacgatcacaattttcatattccaagctctccatttatcatgttcaggccccttatccgggcaggcaaatattatagcagacattccccaatgtttcaacagcagacgcagggaaattgtatcgggtttgtttgtgaataaatagttaaaattctgcaaaaccggcgcgccggcgcttgacggatgcccgtgcggcgcttatcattatgtcctaatacttttttaattagtatctaaggctgcgccgccgcgcggcatccatataaaggagcatcccacccatgctggaactgaagaacatcaccaaagtctacgaggccggcacgacgcaggtcgaagcactcaagggcatcaacattgcctttcgtgaaaacgagttcgttgcgatcctgggccagtccggctgcggcaagaccacgctgctgaacatcatcggcggcctggaccgctacacctccggcgacctcattatcaacggccgctccacaaaggagtacgacgaccgcgattgggacacgtaccgcaaccactccatcggctttgtctttcagagctacaacctcatcccgcaccagagcgtgctggccaacgttgagctcgcgctgacgctctcgggcgtctccggtgaggagcggcgcgcgcgcgccgtcgaggcgctggaaaaggtcggcctgggcgaccagctcgacaaagcgccgaaccagatgtccggcggccagatgcagcgcgtggccatcgcgcgcgccatcgtcaacaaccccgacattctgctcgccgacgaaccgaccggcgcgctcgacagcgagacgagcgtgcagatcatgaatctgctgcaggagatcgcaaaagataagctcatcatcatggtcacgcacaacccggagctggcatcgaaatacgccacgcgcaccgtgcgcctgctcgacggcaagatcgtcggcgacgataacccctgcacggaatccgagacgtccgcacccgtaacggtcaaggtcaaggagcacacgtccatgagctttgcaacggccatgagcctgtcgctgcacaaccttatgacgaaaaaggcccgcaccctgctcaccgcattcgccggctcgatcggcatcatcggcatcgcgctcattttgtcgctctcgcacggctttcagtcctacatcgacaccgtgcaggagcagacgctctcgtcctacccgctgacgatcgaggcaaaccccgtggacatgtccgggatgctctcggccatgtcgggcgcaaaggatgacagtgcggatgcgcacgacctcgataaggtctacgccaacacggtcatgtacagcatgctcaactccatggtcagcagcgcgaccggccagtcgaacaacctgccggagttcaaaaaatatctcgaaaaccccgacaacaagatccacgactatatcagcggcatccagtacacgtatgacatgggcttcgccgtctataccgaggaccccaacggcaccgtcatcaaggccgacacgaccgagctgctgcaaaacgtcatgaagtccatgtacggcggcgactactcgtcctactttgactccatgggcggcttctactccggcttcaacgtctggcaggagctgctgtccggcgaggacggcgcgctcgtgagcgcctcgacgcaaaaccagtacgacgtgatctatggctcctggccgcaaaattacaacgaggtcgtgctcgttgtggacaaaaacaatgaaatttccgacctgacgctctacgccctcgggctcgagagcatggacgacatcagcaacgccatgatgcagtccatgaacaaaaagcagatcgacacgacgcaaagcagctggagctatgaagatctgtgcggccgcagcttcaagctcatcctcccgtcggagggctatgtggccagcggctccggctacacggacatcagccagacggccgacggactgcaccagctctacaacaacgattccgtgggcgtgcagctcaagatcgtcggcatcgtgcgcccggccaagggcagcgtgaccagcagcacctatggttccatcggctacacctccgccctgacggactacgccatcgagcaggccgacagcaccgagatcatccagaagcagctggcaaacccggacgtggacgtgttcaccggctctgcgttcccgaacgccgcgaccgccacgaccgaccagaaagttgccgccgcgcaggcctatctcaacaagctgagcgtggacgaccgcgcaaccgtctaccgcaagtgcatgaccgcgccggacgacaccacgcttgacgccgcgctcacgcagaccatggagaccttcacccgcgacgacgccaaagagatggccgacaacggcgtctttgaggccagcggcaaaacagcgcagcagatgaaggaaatgatcgacgtcatggacgacgagacgtttatccgcttcttccggccgtatatgcgcgcgatcctctccatgcagatgcagcaggagaccgtcaaggcctacagcggcatgacctcgcaggaagtcatctccgccatcagtgccaaaggcatcagcagcagccagtatgcggatgtgtacgacaactacgtcgcctcgtcggccagcggttcgacctacaacaacaacctgaaaaagctcggctacgtcgataaggactcccccagcgccatcaacatctacgcctcgagctttgagaacaaggatcagatctccgcgtgcatcgacgactacaacgccgacgccgccgagaacgatcagatcagctacaccgactatgtcggcctactcatgagcagcatcacgacgatcatcaacgccatcagctacgtgctcattggcttcgtggccatctcgcttgtcgtgtcgtcgatcatgatcggcatcatcacctatatctccgtgctcgagcgcacgaaggagatcggcatcctgcgctccatcggcgcgagcaagcaggacatttcgcgcgtgttcaacgccgagacgctcattgagggcttcacagccggcgtgatgggcatcctgtgtacactgattttgctgatccccatcaacctcatcgtgcaccatctgaccggcctgccgaccctgagcgccattttgccggtgctcggcgcgatcttgctgatcctcatcagcatggcgctgacgttcatcgcgggcctcatcccgtcgggcatggcagcgaaaaaagacccggtcgtcgccctgcggaccgaataaggccaaaacgcatatttccaccacctccgtgcaaactaggagcagcctacatttgcacggaggttttgcattatgaagcagaaaattcttgcggccgtgtgcgcgctggcgctctgtgcggcgctcgtcccggccggctttgccgagcaggccgcggccgacaccgcgcccgtggccgaaaatctggagctgaccacattccgcggcacgtccatcggcggcacactgagcgcaaatgcgcccgacggcagcccgctcaccttccgcatcacgaccgagcccatcaagggcacggtaacgctcaccgacagcggcacgttcgtctatacccccgccgacggcaagcgcgggcgcgactacttcggcttccgcgccgccgacagcagcggcaacgaatcgcaggaggcgaccgtcatcatctccatcaagaagcagaagccggccgtcacctacagcgacatggccggccgcccggaggaatacgccgccgtcatgctcgccgagcaggggctgtgcgtcggccggcaggtcggcgggcagtatctcttcgaccccgacagccccatgccgcgcgatgaatttctggccatgtgcacgcacctgaccggcacttcgatgctgcagggcgtgctctcgaccggtttcggcgacgacgagcagatccccgcctgggccaagacctacgttgcgaccgcggtcatgaacggcgacatcaccggctactccgacggtacggcaatcgtattcgatgcacagcgcggcatcacggcagccgaggctgccgtcatgctcagcaacttcctcgacccctcccccgccgccgcgctcgagggcgactatattcccgactgggcgtgcgccgccgtgtcaagtctgacatcctgcggcgtgtatccggccggcagcgactgtgcggcgtccctcacgcgcgccgaggcggcgcagatgctgctgggcgcgtatgaactgctgcaaaagcgataaaaaaagcacgggccgtttccagatcggaaacggcccgcggctttatgcacggtccaaaatggcttccagctccgccgggctgagctccgggaacgggcgcacgggcgcaggctgcgcctcgtgcgcgccgatgcacttttccatccagaccatggagtaccaggtgccgaatttatacccgcagcgcggaaactccccgacgagccgatagccgagatgcgcatgaaactgcgcgctgtttcgcgtcaggtgcgcgtcgtccgccccgtccgggcagccgatgcaggcatagagattctgaatgttctgcgcgcgcagcaccgcctcgagcgcggcgtacagccgcttgcccgtcccccggtgccgctgatcctcgcgcaggtaaatgctcatctccaccgcccagtcataggcggcgcggctgccgaacggcccggcgtaggcatagccgacgatctcgccgccgcgctccgcgaccaggtacggatagcggcggagcgtggcgcgcatacgcgcggcaaattcctcgatatccggcacggtgcactcgaacgtaatggccgtcttttccacatacggcgcgtaaattttcagcagcacgggcgcgtcgctcaggcgcgcggtgcggatgcgcagcgcagtgtcgtccatatgctcctcactttccgctgtcgccgtagtttgcgagcacgcgcgcggacgggtcgtccacgtcgcagccgtcccacgatttgttcggcatccagaaatcgacgatcatgtgcgcctgaccggggtaatactgctcaaacagttcacggtagagcagcgattccttggtgaacggctgcgcaaagtcgtacctccggcgcagggtctcaaattcctcgtccgtgtacttctgctcggcgtacgccttgagatcgtcgaccatggagtggccgaccgcgtcgctgaaggccgccttctcgcgcatgaggatatcgtgcggaagccagtcgccctcaaaggcgtggcgcagcagatacttgcccttgccgtagacgttgcacttcttggccgggtcgatggacatgacatactgtacgaagtccagatcaccgaacggcacgcgggcctcgagactgttgacggagatgcagcggtcggcgcgcaggacatcgtacatatgcagctcgcggatgcgcttggcggattcctcctgaaacgcctccgggctgggcgcgaagtcggtgtacttatagccgaagagctcatcggagatctcgcctgtgagcagcacgcgcaggtcggtctgctcgtggatggccttgcagacgaggtacatgccgatgctcgcgcggatggtcgtgatatcatacgtgccgagcagcgccacgacctccggcagcgcctggatgacgtcctcgggcgtgatgatgacctcggtgtggtcggcgtgcagatactctgccacctcgcgggcgtacttcaggtcgatggcgtcgctgcacatgccgatggcgaacgtgcggatgggctttttgagcagctttgccgagatggcgcacacgaggctgctgtccagaccaccggagagcagaaagccgagcggcgcgtcggcatccagccgcttttccacgccggcgatgagcttttcacggatgtgggtgcagacggtctccagatcgtcctcgcagacggcatccacctgcgtcatgtcgcggtagcaggtgaacttgccgtcggcataatagtgtccgggaggaaacggcatcacatcgtgcacgaggccgacgaggtttttcgcctcgctggcaaagacgatcgcgccctcggcgtcatagccgtagtacagcgggcggatgccgatggggtcgcgcgccgcgacaaggccgccgcgcctggcatcatagatgaccatggcaaactccgcatccagtccgcggaacatgtccagcccctcgcgctcgtagagcgggagcaggatctcacagtcggactcgctctcgaacgtctcgccctcagcgatgagccgctcgcggatgggccggaagccgtagatctcgccgttgcacacgagcgcgcttccatcccgcgtgaacggctgcatcccctccgggtgcaggcccataatggccaggcggtggaagccgagcgtcgccgcgccgatatgcagcatgcgcgtatcgtccgggccgcgggaaatggtcttgtcaaagccggcgcgcagatcctgcgcggagatggacgagccgagataaccgatgatggaacacatgattttttcctcctgaatatatcaaaaaatacgcagctaccatccaacaataggacgagtagctgcgtatcgtggtgccacctattttacttctcacgggttctaacaaaccgcaccgggataacgtccggctttgacggcgcacctactgaggctctcgcccgttcaggttgcagctcgggagtgttcttcacacaggctctgttatgcggctcgcaccgtcccgcactcgctggaaatgatcgcccgtgctacttttctccgtcaatgcttttgacagaagtatgaaaatgaaagaagagagaaaaaagaaagagtaagcgttttttaccgcacgctgaacagcaggtcgccataggacgggaccggccacttgtcggacggcgtcatggtctcgagctggtcgatcgtgatgcgcagctccgccatggcggagaagaccttgtcgcggtagtagttggccagcgcctggctgccctcgacggtcttggcgcccatgagcgcctcatccaggcggcggaccttgcggtaggcatcgcccaacagcgcggacatttcagggatgatgctctcctcatacgagcagtccgccgtgacggacgcagcgtggatcgccgcagcggtctcggacagctcgcgcagatagctgctgacggcgggcatgatgtcgcgccgcgccatctcgagcatcgtcagcgcctcaatgttgagcaccttgctgtagttttcgaggtggatctcgtagcgggcctccatctcggtgcgggtatagacacggtgcttggtgaacagcgccacgttcttgtcggcgaggtaatacggcagcgcttccggcgtcgtgcgcaggttcagcaggccgcggcgctcggcctccgccagccaggcgtcgtcatagccgttgccgttgaagaggatgcgcttgtgcttgatgagcacgctgcggatgagcgcctgcaggtcggcctcaaagtccttgctgccctcgagcgcgtcagcaaactgctcgaggctctcggcgaccgccgtgttgagcacgacgttgatgccggaaatggaggccgaggaaccgggcatacggaactcgaacttgttgccggtgaacgcaaacggagaggtgcggttgcggtcggtcgtgtccttggggaaacgcggcagcgcatgcacgccgatcttcagcagctccttttcctgtccggcatagggcgtctcgttgacgatggcgtcgagaatgctctcgatctcgtcgccgacgtacatcgacacgacggccgggggcgcttcgttcgcgccgagacggtggtcgttcgcggccgacgccacgctgatgcgcagcatatcctgataatcatccaccgcctggatcaccgcgcacaggaagagcaaaaactgtgcgttctcggccggcgtctcgccgggctcgagcaggttcatgccggtgtcggtggtcagggaccagttgttgtgcttgccggaaccgttgacgccggcaaacggcttttcgtgcagcaggcagaccatgccgtggcgcgcggccaccttctgcatgatctccatcgtcagctggttctggtcggcagcgatgttgccggtcgtgaacaccggcgcgagctcgtgctgcgcgggcgccacttcgttgtgctccgtcttggcgtaaacgccgagcttccagagctcctcgtccagatccttcatgaacgccgcaacgcgcggcttgatgctgccgaagtaatgatcgtccagctcctggcctttcggcggcttggcgccgaagagcgtgcggccggtatagatcaggtccttgcgcttgtcatacacagacttgtcgaccaggaagtactcctgctctgggccgacggtcgtgcgcacggctgtcacgtcctcgttgccgaacaggtggatcacacgcagggcctgacggttgagcgcctcggcgctgcgcagcagcggcgtctttttatcgagcgcctcgccgccgtaagagcagaacgccgtcggaatgcacagcacattatctttaatgaatgcataggacgtcgggtcccatgcggtgtagccgcgcgcctcaaacgttgcgcgcaggccgccggacgggaagctggacgcatccggctcgccgcggacgagctccttgccggaaaactccataatgacctgaccgccgccgcagggcgaaatgaagctgtcgtgcttctcggcggtgatgccggtcatcggctggaaccagtgcgtgaagtgcgtggcgcccttttcgatcgcccagtccttcatggcattggccacgatgcgcgcggcgtcgtcatcaagacgcttgccattttccatcgtcgcctgcacctgccggtacgtttccttcggcagccgctcgcgcatgacggcatcgttaaataccatggatccaaaaatgtcagagatcttttccatctcgcatggtcccctttccgtatttcaaatcagtatcaacaacaaaaaacggcactggtgcccggagatcttgtgctctccacgacgccattgccgtttcaatgtagcaaaatatacgcctgttgcggaaaaatgtcaagcgggaaaaacgcaatttctttcggcggattccacagatttttcggcaaaattgcccgtttttttatccttgacacgtgcaaatgccgtggtgtattatatacatggattttgattggcaaaattctgcgtgctgtttttgcggccgcaggcataagttcatatggtaacttttcgagaacgctgacgtttcacgatgacctgggggaaagtgccccttatcggcatcggaagcgtcttttttgtttttccgcaccaacttctgattcgaggtgactgctatgaacacgtcgctgcataccgtgcgcgcactcctggtctccagttccgaggcgcagacccaacgcatcagcgccctgctcacacgggcgcacatcgtcccgttcgatcacgcaggcagcgcgcggcaggcgctcgaacagtttgacgcaggcggcatcgacggtgtgctcatcgcagagcccatcgccggcagctccggccgggagctggcgctgcagctcaaaaagcggcactgcatggccgtgctgctgctggccgcaccggaacacgcggacacggacgccgccctgctcgaacagtccggcgtgctggtgctgccgaatgacgcgccggaatcgctcatcgtgcagaccatccggctgctgaccgccgtgcgcatccagctcgagcagatgcagcacaagacggaaaagctcgaggcgaaggtcgccgatatccgcatcatcaaccgcgcgaagctcctgctcgtgcagcacctgcagatgacggagacggaggcgcacaaatacattgagaaacaggcaatggacaccagtatgcgccggcggaccattgcggaaaatatcattcgtacctatgaagattgaggagtgtggaccatgaccaagtacatttttgtgaccggcggcgttgtctccggactcggcaaaggcatcacggcggcttcgctcggccgtctgctcaaggcacgcggcctgaaggtcgccgcgcagaagcttgacccctatatcaatgtcgaccccggcaccatgagcccgtatcagcacggcgaggtgtacgttaccgaggacggcgcggagaccgatctcgacctcggccactatgagcgcttcatcgacgaggatctgaacaaatactccaacctcacgaccggcaaggtgtactggaacgtgctcaacaaggagcgccgcggcgagtacctcggcgagacggtgcaggtcattccgcacatcacgaatgagatcaaggactttatctatagtgtcggcagcaagacgaacgccgacgtcgttatcacggaggtcggcggcacgaccggcgacattgagagccagccgtttctcgaggccatccgtcaggtcgggctggaggtcgggcgcgaaaacgcactctacatccacgtgacgctcgtaccgtatctgcacggcagcgaggagcacaagaccaagcccacgcagcactcggtcaaggagctgcagggcatgggcatttccccggacatcatcgtgctgcgctgcgatgagccgctcgaggagtctatcttccgcaaaatctccctgttctgcaacgtcaagcccgactgcgtgatcgaaaacatgaccatccccgtgctgtatgaggcaccggtcatgctcgaaaagaaccgcttttccgagatcgtctgccgtgagctgcacatcgacgcgcccgcgccggatatgaccgagtgggacgccatgctcgagagcatccgcagccgctcgcaccgcgtgacgatcggcctcgtgggcaaatatgtgcagctgcacgatgcgtatctgtccgtcgccgaggcgctgcgccacgctggctatgtctacggcacgcgcgtggacattcaatggattgacagcgagacgatcacgcgcgataatgtagaggaagtgctcggcagctgcgacggcattctcgtgcccggcggcttcggcaaccgcggcatcgagggcaagatcgcggccgcgcactacgcccgcacgcacaacatcccctatctcggtatctgcctgggtatgcagatcgcggtcatcgagtttgcgcgctccgtctgcggcctcgccgacgccaactccggcgagtttgacgagggcagcacgcacaaggtcatcgacttcatgcccgaccagagcgacgagatcaacaagggcggcacgctgcgcctcggcgcatatccgtgccatatcgtgcccggcacaaaaatggcggagtgctacggcacgctggacatctccgagcgccaccgccaccggtacgagttcaacaacgactaccgcgcgctcatgcaggaaaaggggctcgtgctctccggcctgtcgccggacggccacatcgtggagaccgtcgagatccccgaaaacgacttttatatcggcgttcagtaccaccccgagttcaagagccgcccgaacaaggcgcaccccctgttcaagggcctgatctcggcggcgctgcgccacgcagagagaggataagcatgcacgaccgctacgtcaaccccctgtgcacccgctacgccgggcgcacgatgcagcacatttactccgacgacaacaaattttccacctggcgcaggctctgggtcgcgctggccgagagcgagcaggagctcggtctgccgatcacggatgagcagatccgcgagctgcgcgcgcacatcacggacatcgactatgactacgccgcggcgcgcgagcacgaggtgcggcacgacgtcatggcccacgtgctgacctacggcgcgtgctgcccggaggcaaagcccattctgcacctcggtgccacgtcctgctacgtcggcgacaatacggatatcatcctcatgcgcgaagcgctcgagcagatccgcagcctgctggtgaacgtcatccaggcgctcgcggactttgccgaggcgcacaaggcagagccgacgctcgcctacacgcattttcaggccgcgcagccgacgaccgtcggcaagcgcgccacgctctggacgcaggatctgctgatggatctcgagcagctggagtttcagctcggcaatctcaagctcctcggctgcaagggcacgaccggcacgggcgcgagcttcctcgccctgtttgacggcgacgagcagaaggtcgtcgcgctcgagcagaagatctgcgaaaagatgggctttcccggcgcgtaccccgtcagcggccagacctattcgcgcaaggtggactttcaggtgctgcaggtgctgtccggcatcgcgcagagcgcctcgaagttttccagcgacatccgcctgctgtcccacctcaaagaggtggacgagccgttcgagagcggccagatcggctcctcggccatggcctataagcgcaaccccatgcgcagcgagcgcatcgcctccctgtcgcgctacgtcatctgcgacctgcagaatgccgccgtcacggccagcgcccagtggtttgagcgcacgctcgacgactcggccaaccgccgcatcagcatcccggaagcattcctcgccaccgacggcatcctcacgctgtacctcaacgtcatccgcggcctgaccgtgtacccgaaaatggccgaaaagcatctggccgacgagctgccgtttctcgctacggagaacatcctcatgtactgcgtcaaggaaaagggcggcgaccggcaggccctgcacgaggccatccggcagcacagcgtcgccgccggcaaagaggtcaagctccatggcggcagcaacgacctgctcgagcgcatcctggctgacccgatcttcgggctcacgcgcgcggagctcaacaaacttgttgacccccatgccttcaccggcatggccgtacaccagaccgagacgttcctgcgcgagcaggtcgcgccggtcctgaacaaatatacagcactgctcggatgcgacgcatccgtaaacgtgtaaaagaaacaggaggtttctcaacaatgctgacatccatcgtaggcatcaactggggcgacgagggcaagggccgcatggtcgacctgctcagccagaagtatgacgtcgtcgtacgctatcagggcggcaacaacgccggccacaccgtcatcaacgacaagggcaagttcgtgctcaatctcatgccgtccggcatcctgcgcgacgagaccgtgaacgtgctcggccccggcatggtcattgatacggagcacatgttccacgaggtcgcgcgcctgagagaaggcggcatcaccatcacaccggagcacctgaagatcagcgacaaggccgtcatctgcatgccgtaccacaagctgcttgactgcctggaagaggaccgtctggcggacaagaagttcggctccacccgccgcggcatctcccccgcctactcggacaaatacatgaaaaaggcgctgcgcatgggcgagctggccgaccgcgacgcgctcaaggcccgcctggccgacattctcgagtggaagaatctcttcatcgtcaacggctatcaccatgaccccatcgacctcgacgagatgatggactggctcgacacctacgccatgccgttcaaggactacgtctgcgacacgacggattacctcaccgaggccattgaggacaacaagtccctgctctttgaggcccagctcggcgcgctgcgtgacattgactacggcatctatccgtacacctccggctcttcgacgatcgcggcctacgcgcccatcggcgcgggcatcccggaggcccggctcgacacgatcatcggcattatgaaggcctattccacctgcgtgggcgagggcccgttcacctgcgagatgttcggcgacgaggccgctgcgctgcgcgacgccggcggcgagtacggcgctgcgaccggccgtccgcgccgcgtgggcgggttcgacgtggtcgcctcccgctacggcgtgaagatgcagggctgcacgagcatcgctctgacaaagctcgacgtactgtcctatctggacaagatccccgtgtgcgtcgcctacgacatcgacggtgagcgcgtggaccgcttccccatcggcgtgaagctggccaaggcaaagcccatttatgagtacctgcccggcttccactgcgacatctccggctgccgcacgatcagcgacctgccgaaggaggcgctcgactacgtgcactatctggaggctgccgtcggctgccgcatcaagtacgtctccgtcggcccggaccgcgatgcgtacatcaaaatgttctaaaccgcgcaaagcacagcggcccttcgcaaatgcgaagggccgctcatttttattcgatattcgcttcagccgatgccgccgagcgccgcgccggcgacgagcgccacgagcacgctcgcgcagtagacatacttgcacagcggatagtaccagccgccgatgggcttgcgtgcgccgaggttgacgctctcgagcacgagcttcttgccgccgatccagaagaacatgactgccgcgagcagcgcgcccagcgggcagatgtaaatggacacgacgtccatccactgcgacacgatggcctgaatgcacagcgcaacggcgaggccgatcacatggatcaccgccgtggccggcacgcgcttgaggccgaaccgctcctgcagggacgcgaccggcgcctcgtagagattgatgatcgacgtgacgcccgcgaaggccacgcagacgaaaaacaccatcgccacgatgcgcccgcccgccatgccgttcatgacgtggacgaggtaaatgaacatcaggccggggccgccggcgtcgagctgtgcgccgcccgccgccatggcgggaatgatgacgaacgccgccagcagcgccgcgatcgtatcaaagagcgccacattgcgcgcagaactcgggatgcactcgctcttgctgaggtaagagccatagataacgctgccgttgcccgcaacggacagcgagaaaaacgcctgaccgaaggcatagatccagacataagggtcgagcaggcccgcgggcttgatcgtgaagatataccgatagccgtccgacgcgccgggcagcgttcctacatagataccgaggcccacaaacagcaaaaacaggatcggcatcatgatcttatttgccttttcaatgccgccggcgatgccgaaggacatgatgacaaagctcaccgcgaccgcgacgacgacccagacattcgcgccccacgcgctggccgtggcattgaaggtggcgacgatcccatccatgtcctgccccgtggcggacaggccgccgtcaaacgccaggaacgtatacttgaagatccagcccatgacgcaggtgtagccgatggccagcgccagagagccgagcaccgggatatagccgaccagttcgccgggccggcgcttaccccagcgcgtctcggtgcacatgccaaaagcgtcgaccggccccgcaccggctgcgcggccgagcgcaaactccccgatgacgccggtggagccgatgagaatgacaaacaggaaatacggcagcaggaaagtcatgccgccccatttggacaccagcgtcggaaagcgccagatgttgcccatgccgacggccgagccgatgcaggcgatgatgaagccgccgcggctgcgaaagccgtcgcgtttgctgacgttggcgtcgttactcataacattgtttcctttcacgcactcaggcacaaattggtttgattataccgcaaaacccgccccgccgcaacagttgtttgcggaatctgccggataacactatgcagaggcgtcttactcccccggcaggcccagcacaagcgctttctcgcggcggctgtccgcgccgcatgctacacacgcccccctcctctctgcgacacgttttttcaatatttttgcaatcgtataccacagcatttgcgcattttctaccaccgcgcaccggaacaagcgcccggaatgcgatttcccgttcccaacacgcgggttttgtgctatactggcggcacacgaccgccgcacggtatgctcgtgcggcaggaaaatgatgaggagaatactttatgaaggccaccaaacaccgcttctggctctgcgcgctgctcgtctgcatggtgctttccgtcttttccgggatcaccgcgccgccggccatggcagcgaacatctccagcaccgactggatggaaaccgtgccggacgagacaaagctcagcaatatgtcgatccccggtacgcacgacagctgcacgcagtatgtggatatgcgctacatttttcaatgtcaggacgcgagcgttgccacgcagctgatctacggctaccgctatctggacatgcgtctggtgctcgaacagaagcacgaccagcagacgctggtgctcaagcacagcatcgcgcgctgcaagacctccaactccccgtttgccggaacgctcacactcgatgacgtgctgcgcgacgtttccgcgtttctggacgcccaccccaccgagacggtcatcctgtgcatgaaggcggaaaacagcaaggacgatgtcgcggagattcagaaggtcctgtatgagacgatcgacaaggatccggagcgctggtatctgaaaaacgagatcccgacgctgggcgaagtgcgcgggaagatcgtcctcgccacgcggtttgacgacaagcttccggtcggcttcgagcgctgcggcctgtacttcggctgggcggatcagggcgaccgcaccgttttgtctgaccccaccgcgaactccgtgatcaacggccgcgagacgctgtgcgtgcaggatcgctacaactatgacaccgatgacaaaatcgacgccatccacacctgtctgggcaacagtaaggcggcggaggacacgtttttcctgaacttcacgtccacgagcggcagcggaaaagtgggccacccgaaggaatacgccaagcacatcaacctcgacctctacgattatgactggcaggccggaacggcctacggcgtcgtcatcgtggacttcgcgccgaaaaagatcgccgagaagatctatcagacgaatttccagcccgcgcagtaacgcgcgcagccccgaaatcgaaaaagccctttgcgtgcagatcatgcgcacgcaaagggcttttgcatatggattttagtacagctttgcgccggccgggatgtgcggatcaaccatcagcaaatgcagcttttcctcgccgttttcgtgatgcacggcagagatcagcatgccgcaggagtcgatgcccatcatgggccgcggcgggaggttcgtgatggcgatgcaggtcttgcccacgagcgcttccggctcgtaataggcatgtatgccggagagaatcacgcgatccgtacccgtgccgtcatcgagcgtgaacttgagcagcttcttcgacttcttcacggcctcgcacgacttgaccttcacggcacggaaatcggacttgctgaacgtgtcaaagtccacgaaatccgcaaacagcggctcaatctgcacgttggagaagtcgatcttctcctccgctgctggcgctgcgggcacggtctcggcgggcttggcctcggccgtttccggcttcttgtccgcgtccagcggcttcatggtcgggaacaggatcacatcgcggatggagcttgcgccgcacagcagcatggcgcagcggtcaatgccgaagcccaagccgccggtgggcggcataccgtattcgagcgccatgacgaagtcctcgtccatcatgttggcctcttcatcgccgtgggcgcgcttttcggcctgtgctttgaagcgctgatactggtcgatggggtcgttgagctcagagaaggcgttgcccatctcgcagccgcagatgaacatctcatagcgctcggtgagcgcgggctgctcggggctgcgcttggccagcgggctgacctccacggggtacatggtgatgaatgtcggctggatgagcgtggactcgaccttctggtcgaacgtctcatagagcgcgttgccccacgtgtgggcgacgttttccatgtccacgcccacgctcttggcgagggcgactgccgcgtccgcgtcgccgaggatggccatgaagtccgcccccgtgacgtccttgacagcgtcggccatggtcacgcggcgccagctcggcgtgaggtccacatcgtggcccagccactggagctgatacgtgccgagaatctccttggccgcgccggagaggatgccctcgaggatgtccatcatgccgtcgaggttggtataggcctgatagagctcacaggtcgtgaactccggattgtgcttggtgtccatgccctcgttgcggaagatgcggccgacctcatacacgcgctcaatgccgccgacgatcaggcgcttgaggtgcagctcggtcgcaatgcgcatatacatatcaatgtcaagcgtgttgtggtgcgtgatgaacgggcgcgccgtcgcgccgccggcgatggggctgagcacgggggtctcgacctccatgaagcccaggccgtccaaatagcggcgcagataggccacgaaccggctgcggatctggaaattgcgcttgctctcagggttcatgatgagatccacatagcgctggcggtagcgcagctccgtgttcgtcatgccatggaacttctccggcagcgggcgcagggacttgctgagcagcgtgacctgctgcacgtggatggagatctcccctgtcttggtcttgaacgcatagccgcgcacgccgatgatgtcgccaatgtcatacttgcggaaatcggcaaactcctgctcggtgacggcgtccttgcggacgtagagctggatctggccgcggtcgtcctgaatgtcgcagaagatggccttgcccatgccgcgcttggacatgatgcggccggcagcctgcagcgttttgccgtcataggcgtcaaaatcgttcttgatatccgccgaataggcgctgcgctcaaagcgcgtctgcacaaaggggtcgcgcccggcgtcctgcagcgccttgagcttgtcgcggcgcacctgaaggatctcggacagggacggctctgccgccgcctgctggttctttctctcttcgttcatgatggactcctcagtcttcgttttcgacggcaatgatcttaaactgcagctcgccgaccggggctgttaccgtgacggtctcgccgaccttgtggcccttgagtgcgaagccgaacgggctgtcgtccgaaatgcagccctccatggggttggcctcctgcgagccgacgatggtgtactcctcttccacgtcctcgtcgacgtcgagcacgcgcacgtggctgccgatggtcacgacgtccgccgcgacctcgaccttctccacgacctcggcgttctcgatcaggtccgtgatctcggcaatgcgggagtagagcttgccctgctccgtcttggcctcgtcatactcgctgttctccgacaggtcgccgaacgagcgcgcctccttgatgagctccgcgacttctttctcgcgggtcgtctcgaggtaatgcagttcttccttgagcgtgtccaaacgctcctgactcatcttatatctgctgtcgatcgccataatccgtctccttatatcattgaaatttcagtatatctccgttgattcagcgcagcgcagcgatcgctgcctcaagctgcgcatcgacatcgctgtccgcggccggggccacgacgacatccggcacaaggccgccctgctcggacaggtccacgcggttgggcgtgagatacttccggctcgagatgtgcacggcgctgccgtccggaagcgcgatggtcgtctggctgcggcccttgccggtcgtgttctggccgacgatggtcgcccagtcatactcctgcagcgcggccgcgaaaaactccgccgcactgtaggtgttgccgttgacgatgaccgccatcggcactttgacgcagacgctgtcgctctgcgtgacggtctcttttccgttgccgtcgacgctcacgaacaggtcgccctgcggcagcaggtgatccaggatcgtgatgagctccgagagcaggccgccggggttatcgcgcaggtcgaacaccagcgactttgcgccgaggtccagcagcttatcgactgcctgcacggcacggctgccgccgccggtctcaaagttgcggatctggacatagccgacgccgttatccatgagcttatacgtcacgggatcggtgtaaatgaccgtacagtcgagcgtgacggtctggctcttgccggcggagtcctgaatggtgagcttgagcgtcttgttgagcttggcgcggatggtgctctgcacgtccgagagcgtcttgcccgtgacgtcctcaccgtcgatcgccgtgatgatgtccccctgctggaggccggccttcgccgcgggcgagtcgctcgtcacggctgtgatgcgaaagcccttcgtcttgtcgtcgagctggatggtcacgccgatgccggcgtactcattgttggagtacatctgataggccttgtattcctcggccgtcatgtaatagctccacttatcgccgatggcgctgatgatcgcgctcgatgatgcgtcgctgatcgccgtgtcgtccgcgtcgccgatatagtctttatccacgacctgcttgacctgcgcaaacttcagcgcgagcttatagttgctgctgccgccgaacttgccgacgaagatcatcgacgtgaccagcgcagtcaccagaatacagatcacacaggcaaggatactcgccctccagccgtgcattctgccgctttttctgcgggcgggcactttttccgatgcctgttcctgtggcttgtgttcgtccatgctatccctccgggtccatttgccgcctgcatcgggcagccccaatgcagcagatgagccgggcagccattttccggctgcccggcagtttcattcagtcaaaatatgtccgatcagcgcgcatagttgagcgggttctggcgcacgccgttgaccgtgacctcccagtgcagatgcgggccggtggagttgccggtcgagccgacataaccgatcgtctggcccttggagaccttctggccggaggagaccgcgatggaactcatgtggccatagagcgtggtgatgccgttgccatggttgatgacgacacagttgccataaccggacacagcgccggccgtgatgaccgtgccgccgtcggccgcaacgatgctcgcgccatagctcgcgccgatgtccacaccggagtgatacttctgcgtgtgatagatcgggtggtagcgccagccgaactccgacgtgatcgtatggcaggacgggcacggccacatcatggagccggtggcgccgttgtccttgcccgcatcatagctggggtcgtttttcttgttcgcctcttcctggcggcgcagatccgcgacctgctgatcgatctgcgactgtacgttcttctgctgctgctcgtactgatcgtagacgctcttataagcgttgatatccgactccaggctggcgagcagcgcgttggcctcggacaccttctgctgcagctcgacctgcttggtctccagctcggactgcttatcctgcagctcggtacgggcgtcctcaagctcggccttgacggtctcgaccttttcacgggcggccgtcatgtcggcctgcacctgtttattatatgcaatgacctcgccgaccatgtccatgcgggcaaggaggtcagagaggctggtcgcctcgagcagaatggcgatgtacgacatctggccgtactcctcaagatggcgcacgcagccgcggaagcggaccgtctgggcctcttcttcctgcttggcttcctcgagctcaacgcccttgtcctcgatctgctggtcataggccgtgatctgctgcttgacgacctcgatctcctgctgcgccagatcgttttcctgatccagcgcggccttctgatcgaccacgctggcctttttggagcggagattgttgatggttttctgctgctccttctgcttggcctgcagctccttacgctgctgcgtgagctggttgatctccgactgcgacgccgcgctggcattgatcgggatcagcgccgtcatgagcgaaacgataaaaatcaacgcaagcagcacgcaaatgacggatcgaacgactttacggttcatcttcattcgatttcctccttaaactttcagatagttgcgaatggccgtgaggccgccgaacacgccgacgagcacacccacgccaaggaacaccagcagcagcggcagcgccacggatgcaaacgggagcaccgtgatgataccggccgccatggtagacatgatcttgctgacgatcaggctgtaaagtccccactggagcaggaacgcgaccagaccgccgaccaggccgagcacaaggccttcgaccacaaacggcagacggatgaagccattcgtcgcaccgaccatcttcatgatggcgatctcttcacgccggccgaacgtggccagcttgatggtgttggtcataataaacagggacaccgcgataaggatcacgatcaaaacgacggagacaacgctcacaatgttccggaacgtaataaagttttccgcgtaatccaggtgcgcggtcacatcggcgatgccgtcgacattcttgagcgcggcctgcgtgtccttcatgagcgacagatcgtcgagcgtcacgacgtagcggtgacgaaagaccgaggcgtcaatgttgtcaaagaggtcggagtcatactcagcctcgaacgtctgcatggcctgctcgcgcgtgacgaattcgaccgtggcgacattcggcaccgcggcgacctggggctcgatggcccgggcctcgtcctccgagagcgtctcatcgacgtaggcaatgacctcgttctgattttgcaggcggtcgatgttcgcgtcgatgttgagcgtcagcagcgaaaagctgcccatgatgagcaggcacgcgatgataatcgtgatcgacgcgaaggacataaaaccgtgcgtgaagatgtttttcacgccctgcgtcatcaggtagttgaatctattcagcttcatatccgtagtacccgtccaatccgtcactgatgactcttccggcgtcgatagagatgacgcgcttggaaaaagcgtcgaccagttccttttcgtgcgtcaccacgaggaccgtggtgccgagctcgttgatcttctccagcagcagcatcagctccagactgcgcaccgggtcgaggttgccggtcggctcgtccgcaatgatcatgcgcggattgttcacgagcgcgcgggcgatggccacgcgctgctgctcaccgccggaaagctccgccggaaagcgcttttcccggtcggccaggccgaccagctcgagcacctgcggcacgcggcggcggatctccttgttggaagctcccaccacgcgcatggcaaacgcaacgttttcatacaccgtcattttgtcgatcaggcgaaaatcctgaaaaatgacgcccagtgtccggcgcagcttcggcagcttgcggcgcttgatgccctgcatgtcaaagccgttgaccgcgatctgtccggatgtggggctcagctcgccggtgatcagtttgatgatcgtcgtcttgccggagccggacggcccgaccagaaacacaaactcgccctcgttgatcgtaaaactgatcccattgagggccgcagcctccgtgttcccgtagaccatcttcacatcgttcatttgaaccataagatgtcctccaatatgttgggcttacgcccgcccgggtaggtctcagaacttggcagtgttctgagaatcgaggtattgctttaccatgaccgcgaccttgaagaggattgcatcctcaaactcgcgcagatccaggcccgtgatcttcttgactttctccaaccggtataccaaagtgtttcgatggacgtagagcttgcgcgccgtctccgaaacgttgagattgttctcaaagaagcgattgatcgtgtcgagcgtgtcctcatcgagcgcctcgatgggatttttcttgaacgcttcggacaggaacatctcgcacagcgtcgtcggcagctgataaatgatgcggccgatgccgaggttgtcatagtgaatgaccggcttctcgttttcaaacaccttgccgacctcgatggcgacctgcgcctccttatagcggtcggccagctcgcgcaggtggttggccgtcgtgccgatgccgatgaccgtctgcacgtgcagctccgtgtgcacggcgcgctcaatgctctcggccagcgcgcaaacatcctccgaggtctcgtccggcgtcatttccttgatgacgacaatgtccgactcgctcacgctgagcacgaaatcatgctgccgatccgggaacatgttctggatcagctcgagcacggcgatatccgtcacgttcacctgacgcaccagcagcacagcgcgcggcacgtcggtggtaaaatgcagctccttggcgcgcacatacacgtcgccggggagaatgttgtccgaaatgatgttcttaacgaaggcggccttattgtgcttttcctcaaagttcgtgctggcctccgtcatgccgacggccgcgagaatgcagatgctgcgcgccgtctggtcattgccctcgacaaacacggcatactcaaaacgcgccgtgctggcagacagaatcttatacgtgcgtgcgtccgttgcaaacagctgctcctgcacttcacccaccgcggcctgaaagtcatccaggcgcgagccgatcatcgaaagctcactgcaggcaatgacaaacccctgctcgtccacaacaccaatgcagcgcgtggtggcatctttcatctgaacgatcacgccctgaaaaattctgctcgacatatcttttcctcctacgaacggccgccgcagtctcccacagcacctaccaatttcctactttacataatagacgatttatgtgcatttttcaatagaaaaatggtcgttttttgtgaataattttcgaaatttcgtgagatagtcggataatttcccgaacttttgtaaattatcacgaagctggaagcgagaaaacgagcatcgcctcagcgggctgcaattcccggtaagcgcccggtgacagcgcgggatcgagcgtcagcgccccgatcgacagccggtgcagctgcaaaacgggcgtcccgcagccggccagcatccgcttgaccatatgatatttcccctcatagaccgtgacgcggcaccccccctgctccggcagcagctccagccgggcgggcaggcactgcgtcccgtcgccgaggacaacgccctgtgcaaagcggtccacatccgcgctcgtgggctgtacatccgtgcgcgcgaagtagaccttcggcacgtgctttttcggcgtgatgacacggtggacatagtccccgtcgtccgtaacgagcagcaggccggtcgtgtccttatcgagccgcccggcgggcacgagcccgaagcgccgcagctccggcgggaacagatcgagcaccgtcggctgactgcggtcggccgtcgcggtgaggacgccggcgggtttatggagcatatagtaatgatatgcctgatagcgcaggacctgtccgcgcaggcagacgacagcggtctccgcgatcttctgctccggcgcgcgggcgggcacaccatcgaccgtaacctcgccgcggcggatatacgccttggcctcgcgccgggaagcagcgccggtatcggccagatatttgtccagacggatcatgcgcgcccctcctttacggccattggacgtattataacatatccggcggcaaatttgaataggcttgttacgaggtgtggttatgaagctcaaatcctttcactggacaagacggacggtcgtgtatgcgctcatcggtctggccgtgctgctggcgctggccgtcatctggcgcagcaacggcggcgtgctctcggcgcactacaacgtcacgacgacggacgggcgcattgcctatctgcaggcgctcggctgggaggcggatcccgcgacggaaacggcgcaggagatcgtgatcccgcgtgtgttcagcggtgtattcagcgattacaacgccctgcaaaagcagcagggatttgacctgtccacttacgccggcgagacgtgcacagcctatacctaccgcgtgacgaactacgagggctcgacggacactgtgctcgcgcagctgttcgtctaccgcaaccgcgtcatcggcggcgacatccacgcgacggcgatggacggcttcatgcacggtctgcgatgaatgggcaaaaaaactcccggcaggaatgtgccgggagttttggtttcgttcgggttcaggcagatgccttggggctcaggcgagcgccgtccagcgctcaatgccggtcagctccgtaaaggtgtggccgaccgaggcctcggtaactgcggcgtagtaccatgcgccgggcgtgacgtcggtaaagtgcgacgctgcctgcgcattggcctgcacgaacgtcaggtcgcagctgcggccaagcacgcggttgaggatagtcaccgcctcggcgcgcgtgatggtctggttcgggtggaacgtgccatccgcatagccgccgacccagccgttggcataggccgtagcgaccgcatcatgacaccatgcgctgcctacatcggcaaacggcatgcccttggacgtgttcacaccgtagatcccggtcagaatggtcacaaattccgcgcggttgatgggcttgcccggctggaacgtgccgttgctgtagcccttgatggcgccggcattggccagcgtgctgaccgcgaccgcgtaccacttgccggccggaacatcgctgaagccattgtcgctgcggtcatactgcttgtgcgcctgtgcggtcatgagctcatagagcagcttggccgcctcggcgcgcgtgagcgtgccgttgggcacaaaggtggtcgcggtgcggccggaagcataggcgttgtggttggtcgtatccagcaggccggccgactgcgtcggctccgtgccggtgccgctgccgctgttgttgccactgtcactgttgttgccgctgccgctgttgttgcctatctgggaaatgtacttttccagcagcgccatcgcctgctggagcgtgatggtgcggctgttgtcgagcgcacagatgatcgtcacaatgttcttcaggttcatattcgccgaagaaatgagctgagacagcagctgcgcgatctgatcgtttgtgaggatgctgccggcaaagcccgtcaggatggcattgatgccggtctgcgtcataccaaaggctttcaggatctcggcaagcgcctgctgggcggcctcgctgatcgcgccgccggcggcaatgtcgccgatgacctgaccgaagttgatgttcaccgtgttgccggtgatggtgatgatgccgtgcatgtagttattgttgctggcgatgtccttgaacagatcgcccacgtccacgttcacgatgccgtggacgaaattgctgtcgctgccaatgtggtcgaccagatccttaatatttacgccgacaatgccgtgaatgaagttatcgtcattggcgatgtcgatccggctcaggatctcactgagcaggccgttgtgcagctggccataggccgtgtcggatgtgctggtctccgcctccgtggtgtctgccgcgaaagccgggacagcagcgagactgaatgccagcgccagggccagtatcaggctcaatgtcttgcgcattttttcatggaattttgcctcctttaagttccaagcaaacatacatggaaaaggtgccggcaaaatgtcggacacaggtgtccgcatcccatcggcgcgaagcaagaagccttttttaaccacgaaatataggccgcaattcttaaaaaagcatttgaaaagtaattaaagtttcgtgcttgaaacaattttgtcgaaaaacaaaaaaattcctctccggcagatgccggagaggaattttgcatgctgaaaattactcgttgatggcgatgacaacaccggaaccaacggtacggccgccttcacggatagcgaaacgcaggccaacctcgatcgcgatcggggtgatcagctcgacgtccatgtcgacgttatcgccgggcatgcacatctcaacaccctcggggaggctgatgacgccggtcacgtcggtggtacggaagtagaactggggacggtagttgttgaagaacggggtgtgacggccgccctcttccttggacagaacgtaaacctggcccttgaacttggtgtgcgggtggatggacttcggagcagcgaggacctggccacgctcaacgcccttcttgtcgatgccgcggagcaggcagccgacgttgtcgccagcctcggcgaactcgagggtcttgtggaacatctcggtgccggtgacggtggtctcctgggtgtccttgatgccgacgatctcgaccttatcgccaaccttgacgatgccacgctcgacacggccggtaacgacggtgccgcggccggagatggtgaacacgtcctcgatgggcatcaggaacggcttgtcagcagcacggtccggagtcttgatccaagtgtcaacagcgtccatgagctcccagatgcacttgtactcgggggccttcggatcggtggactcggagatcagcgcgttcagagcggagcccttgatgatcggggtgtcgtcgcccgggaagtcgtacttgtcgagcagctcacggacttccatctcgacgagctcaagcagctcgggatcgtcgacctggtcaaccttgttcaggaacaccagaacgtacggaacgttgacctgacgggcaagcagcaggtgctcacgggtctgagccatcgggccgtcggaagcagcgataacgaggatcgcgccgtccatctgagcagcgccggtgatcatgttcttgatatagtcggcgtggcccgggcagtcgacgtgcgcatagtggcggcccttgatctcggtgccgtcaaggccgatgcggtcgtcggtctggtactcaacgtgagcggtgttgatcgtgatgccacgcgctttttcttccggagccttatcgatctggtcgtaggcagcgaactcggcgctgttcgggtcagccagggacagaaccttggtgatcgcagcggtcagggtggtcttgccgtggtcgatatggccgatggtgccgatattgacatggggcttggttctattgtacatctgctttgccattagaatatcctcctaattctaaaataatgttgtgacttactttcttataaggcacattgtgccggttgcgcaggtcagttgctgccgtggatgatcttctcctgaagagacttcggcagctctacgaagtggctgggctccatgctgtaggtcgcgcggccctgcgttttgctgcgcaggtcggtcgcatagccgaacatggatgccaggggcacgttcgccgtgacgatcgccgcaccgttgcggatgtccgtgccggcgatctggccgcggcgggcattgatatcgcccatgacgtcgcccatatagctttccggcgccgtaacgacgaccttcataatgggctcgaggagcgtcgggccggccttctggcaggcctccttgaatgccatgctgccgcagatcttaaacgccatctcggacgagtcgacctcgtgatacgagccgtcgagcagcgtgactttcacgtccacgacctcgtagcccgcaagcacgccggcctgcatcgcgccctggatgccctgatccacacaggggataaactctttcgggatcgcaccgccggtgatctggttgatgaactcgtaacccttgccgggctcgttgggttccaccatgagcttgacgtgtgcaaactggcctttgccgccggtctggcgcgcgtagcgcgtgtccaccgtagcggccttggtgatggtctccttgtaagagacctgaggtctgccgacattcgcctcgacgcggaactcacgcagaaggcgatcgacgatgatctccagatggagctcgcccatgccggcgatgatggtctggcccgtttcctcgtccgtgtaggccttgaaggtggggtcttcctcggcaagcttgccgagggcgatgtccatcttctcctgcccggccttggtcttgggctcgattgctacgcggatgaccggttccgggaactccatcgactcgagcacgatcgggtacttttcgtcgcagagcgtgtcgccggtcgtcgtattcttgagaccgaccgccgccgcaatatcaccggaatagacctgcgtgatatcctcgcggtggttggcgtgcatcaaaaggatgcggcccagacgctcgcgctggcccttggtggagttcaggacggatttgccggcttcgatcgtgccggaatagacacggaagaacgccagacggccgacgtaggggtcggtcatgatcttgaaggccagagcagagaacggctcggaatcgtccgcggagcggtgctcgacctcatccgtcttgggcaccgtgccggtgatcggcgggatgtccagcggggacggcatataatcgacgatggcgtccagcagcttctgcacgcccttgttcttataggacgtgccgcacacgatcgggacgaacttgacctgcgtcgtggccttgcggatggccgccttgatcatttcggtggggatttcctcaccttccagatacatctccatgatctcgtcgtcgaaatcggcgacggcctcaaggagctgcgtgcggtactcttcggcctcggcgcgcatgtcctcggggatctcctcgacgcgcatatccttgccaagatcgtcgtagtagacgtccgccttcatctcgagcaggtcgatgatgccgcggaagtccgcctcggagccgatcggcagctgaatcggaacagcgttgcagcgcaggcgctcgtgcaccatgtcgacaacgttgtagaaatttgcgcccatgatatccatcttgttgatgtagatcatgcggggaacattgtaatggtcagcctgtctccagaccgtctcggactgcggctcaacgccgcccttggcacaaaggaccgtcacgcagccatcaagcacgcgcaggctgcgctcgacctcaacggtgaagtcgacgtggcccggggtgtcgatgatattgatgcggttgcccttccagaagcaagtggtcgcagcgctcgtgatcgtgatgccgcgctcctgctcctgcgccatccagtccatggtggcggtgccttcatgggtctcaccgagcttgtggttgacgcccgtgtagaacagaatgcgttccgtcgtggtcgtcttaccggcgtcgatgtgcgccatgatgccaatgtttcttgtgttttcaagggaatattgtctgggcataattgatagctcctagtcggaagattaccagcggaagtgtgcgaacgccttgttggactcggccatcttgtgcgtgtcttcgcgcttcttcacagcagcgccggtgttgttgcaggcatccatgatctcgcctgcgaggcgctccttcatggtcttttcgctgcgcttgcgggcatagccggtcagccagcgcaggccgagcgtctggcgtctctcaggacgcacttccataggaacctggtaggtcgcaccgccgacgcggcgggccttgacttcgaggctcggcatgatgttattcatggcttcggtaaacgcatcgagcggttccttgccggtcttttccttgatgatgtcaaaagcatcgtacacgaccttctgagcaacaccctttttgccgtcgagcatcacgctgttgatgagcttggtcaccagaacgctgttgtacatcggatccggcaaaatttctcttttgggaacgttacctcttctgggcactatacttccctccttcattaaaaaatgacttcacaggtactcgaagatgcggtgcatctccgtctgcgccccgaggttaacgaatacatatatatcagttaacaacagggcaaaatttgctgttggaacttacttctttcctgccttcggccgcttggcaccgtacttggaacgggcctgcatacgtccggaaacgccctgcgtatcgagcgtgccgcggatgatgtggtaacgaacgccaggaagatccttgacacggccgccgcggatcataacgacgctatgctcctgcaggttgtgaccgatgcccgggatgtaggcggttacctcgtagccgttggtcagacgcacacgggcgatcttacgaagcgcggagttcggcttcttgggggtagaggtacgcacggcagtgcagacgcctctcttctgaggtgcgctcagattggtctcgcggttcttcagggtgttgaggcccttctgcatggcgggagacgtggacttgtaggtgactttctctctgccctttctcaccaactggttaaaagtaggcatggttttcctcctttcctcgaaaatggatctatttatacgatgccaaaaaacagcatcggataaaccgtgattctgccggaaaattttcaggaaatcccggccatttttgtgctttttacacaggcatgacaaatcggtgggcgcacgcccacgcaaaataggattttagcatattgcacaagattcgtcaagcatttttattcaagacggaagcgaaaatttcaccgggatatgcaggcatatcccggtgaaacggttggtatttggccgtttaaagcgcgttggagatgttggcgagatcggacagatccacgccgtcgtcctccggctccgcggggactgccggctcctcattcgtctcgaagttgcggtagcaggcaaggccgctgccggcgggaatgagcttgccgatgatgacgttctccttcaggccgacgaggtggtcgatcttgcccttgatggcggcatcggtcagcaccttcgtggtctcctggaaggacgcagccgacaggaagctctccgtggcgagcgacgccttcgtgatgcccataaggacatgctcagccgtcgcgggcgtgagctcggtctcccctgccgcgatgcgctcggcgatcgcgcggttggccgcgcggaactcatgcagatccacaatggcgccggacagcaggttcgtgctgccggaatcgtcgatacggaccttgcgcatcatctggcggacgatgatctcgatgtgcttatcgttgatgtcaacgccctgctgacggtagaccttctggacttcctgaatgatatactgtcggcaggcatcgacgccgcagatacgcagcacgtcgtgcgggctgtacgcgccgttcgaaagcggctggcccttcgtgaccgtgtcgccgttggcgaccagaatgccggcggagtacggcaggttgtacgtgacggtctcgccgtcgaccgggttcgtgaccgtgaccgcatagatggaggtcttcttcgtctcctcgatgctgacgacgccggggatctcggcgagggtggccatcttcttcggcttgcgcgcctcgaacagctcttcaacacgcggaaggccctgcgtgatatcgtcgccggcgacgccgccggtgtggaacgtacgcatggtcagctgcgtgcccggctcgccgatggactgggcggcgataacgccgaccgcctcgccgatgttgaccggctggccgatggccaggttgatgccgtagcacttggcgcagacgccgttgcgcgcctcacaggtcatgacgctgcggatcttgacttcctcgatgccgtgctcttcgagcgtcttggcatcgtcgggcatgagcatatggtcggtatcgaacagcacctcgccggtcttgggcgacacgacgggctcggccgggtagcggccgtggatgctctcgccgaggctctggacttcctgtcccttgtcgaacacggcgcgggccatgatgccgtcggtcgtaccgcagtcatcctcgcggatgatgacttcctgcgagacatcgaccaaacgacgggtcagataaccggagtcggcagtacgcagtgcggtatcggccaggcccttacgggcgcctcgggacgagatgaagtactcgaggacggacaggccctcacggtagttggccttgatcgggatctcgatggtcttgccggcggtgtttgcgatcaggccgcgcataccggcgagctgacggatctgcgccatggaaccacgggcgccggagtccgccatcatatagatggggttgaactcatcgaggcagttctgcagggccgccgtgacgtccttcgtggtcttctcccactcggacacggccagacggtagcgctcgtcctcggtgatgaagccgcgcttgtacttcttctcgatcgcaatgaccttcttctccgtggcggagatgagcgttttcttctcctccgggacggtcatgtccgcgatggagatcgtgatggcgccgatggtggaatacttgtagccgagcgccttgacgttatcgagcacttcggtcgcaacggtgaagccgtgcttctcgatgcagcggtcgatgatcttgccgagctgtttcttgccgaccttgaagctgacctcgaggtcgaacatgtgctcggggtcggtgcggtcaacgtagccaagatcctgcgggatgggctcgttgtagatgatgcggccgacggtcgtctcgatcgtgcggtgcagcgtctcgccgttgacctcgcgcgccacgcgcaccaggatcggcgcatgcaggccgacatcgccgtagttataggccatgatagcttcattcgggtcgcggtagaccttgagcggcttatagctcgggagcttgctgccctcagcctcggccttcttgtgcgcggcgacaaagtcgtccgcgtcgacgatctcattgaccggcagatcggtatcgccagcatcggtcacgaacacctgctcggcgcccttctcggccttgccgaggcgaacgtaggtcaggtagtatgcgccgaggatcatatcctgcgtcggcacggtgacggggtggccgtcctgcgggcggaggaggttgtttgccgagagcatgaggatgcgcgcctcggcctgcgcctccgcggacagcgggacgtggatagccatctggtcgccgtcgaagtcggcgttgaacgcggtgcagcacaggggatgcagcttgagcgcacggccctcgaccagcacgggctcgaacgcctgaatgcccaggcggtggagcgtcggtgcgcggttgagcatgaccggatgatccttgatgacgacctcgagcgcgtcccagacctcggtgcgctgcttgtcgaccatcttcttggcggacttgatgttgttggcaacaccgtcctcgacgagctttttcataacgaacgggcggaagagctcgatggccatttccttcggcacgccgcactgatagagcttcagatccgggccgacgacgataacgcttcggccggagtagtcgacacgcttgccgagcaggttctgacggaagcggccttgcttgcccttgagcatatccgacagggacttgagcgcgcgggagttggcgccggtgacggcacggccgcggcggccgttgtcgatcagggcgtcaacagcttcctgcagcatgcgcttctcgttgcggacgatgatgtccggcgcgttgagctgcatgaggcgcttgaggcggttgttgcggttgatgacgcggcgatacaggtcgttgaggtcggacgtggcaaaacggccgccgtcgagctggaccatggggcgaagctcgggcgggatgaccggcagaatgtcaatgatcatccactccggacggttgccgctgcggtggaatgcctcgacgacctccaggcgcttgacgatcttcgccttcttctggccgctggcctcctcgagctcggcgcgcagctgctcggagagcttggcgcagtcgatctgctgcaggagcttcttgatggcctcggcgcccatgccggcctcgaaatcgtcctcatacttctcgcgcatgtcgcggtactctttttcggacaggatctggcagcgctgcagcggcgtcatgccggggtcggtgacgatatacgcaccgaaatacagcaccttttccagcacgcgcggggtcagatccaggatcaggcccatgcgcgacgggatgcccttgaagtaccagatgtggctcacgggcgcggccagctcgatatggcccatgcgctcgcggcgaacctttgcgcgcgtgacttcgacgccgcagcggtcgcagatcttacccttgtagcggatcttcttatacttgccgcagtggcactcccagtccttcgtgggtccgaaaatgcgctcgcagaacaggccgtcacgctcgggcttgagcgtgcggtagttgatggtctcgggctttttcacttcgccggaggaccaggaaaggatcatttcaggggaggcaatgccgatctgaattgcatcaaacggggtgtagctcatgttttattcctcctccttatcagaatcgtccgtgtagtcatcgtcgccggcatcgccgaacgcgccgagactgtcatcttcctcgaccggtacgtcctcaatcgtgaagccgctgccggtgatctcatcatcgtcggacttgtaggacatctcatcgcgcatacccgggatgtaatcgtcctcgtcgtccttgagctcgatctcgtcgccgttctcgtcgaggatgcgcacatccaggcacagggactgcagctccttgatgagcaccttgaacgactccggcacgcccggctgcgggatgttctcgcccttgacgatggcttcgtacgtgcgcacgcggccggtcacgtcgtcggacttcaccgtcaggatctcctgcagggtgtaagccgcgccgtaggcctcgagcgcccagacttccatttcgccgaagcgctggccgccgaactgcgccttgccgccgagcggctgctgcgtgacgaggctgtaggggccggtgctgcgggcgtggatcttatcatcgacgaggtggtggagcttgaggaagtagacccagccgaccgtgacgtcgttatcaaacttctggccggtgcggccgtcgtacaacacgctcttgccgtcctcacgcaggccggccttgttgagcgtctcgcggatggtgacctcgtttgcgccgttgaagaccggcgttgcgaccttccagccgagcgcctgcgcggcatagcccaggtgcacctcgagcatctgaccgatgttcatacgggaaggcacgcccagcgggttgaggacgatatcgagcggcgtgccgtccggcaggtacggcatatcctcgcgcgggaggatgcgggacacgacgcccttgttgccgtggcggccggccatcttgtcgccgacggagatcttacgcttctgcgcaatatagacgcgcacgacctcgttgacgccgggagacatctcgtcgccgttctcgcgggtgaagcgcttgacatcgaccacgatgccggcctcgccgtgcgggactttgagggaagtgtcgcggacctctctcgccttttcgccgaagatggcgcgcagcaggcgctcctcggcggtcagatcggtctcgcccttcggcgtgaccttgccgaccagaatatcaccgctgcgcacctctgcgccgacgcagatgatgccgcggtcgtcgagatacttgagcgcatcgtcgccgacgccggggatatcacgggtgatctcctcggggccgagcttcgtgtcgcgcgcgtcgcactcgaactcttcaatatgaatggaggtgtaaacgtcctccatgaccagacgctcgttgatgagaacggcgtcctcgtagttgtagccttcccaggtcatgaagccgaccagcaggttcttgccgagcgcgatctcgccctgcgaggtggccggaccgtcggcgatgacgtcgcccttgttcaggcggtcgccgaccgcaacgatcgggcgctggttgatgcacgtgccctggttggagcgggcaaacttgatgagcttgtagtccttgatctcgccgctgtcgtagcgcaccttgacgctgtcggccgagacggccagcaccacgccgtcgtcctcggcgaggatgaccacgccggagtccacgcacagcttgtgctcgatgccggtggcgacgatcggtgcctccgtgaccatcagcggcacggcctgacgctgcatgttcgcgcccatgagggcacggttcgcgtcgtcgttttccaggaacgggatcatggccgttgcgatggagaccatcatgcgcggggaaatgtcgatgtagtcgacgcggtcacggtcaacctcgacgatctcgtcgcggtggcggcaggtgatacgctcgttgatgaggcagccgttttcgtcgaccggctcgctcgcctgcgcgacgatgtagcggtcctcaacgtccgccgtcatgtactcgacgtcgtcggtcacgcggcaggtgcccttctccacgcggcggaacggcgtcacgaggaagccgtactcgttcacgcgggcataggacgcgaggtagctgatcaggccgatgttcgggccttcaggcgtctcgatcgggcacatacggccgtagtggctgtagtgcacgtcacggacatcgaagctcgcgcgctcacgcgacaggccgccggggccgagggcggagatacggcgcttgtgcgtcagctctgccagcggattggtctggtccatgaactgggacagcgggctgctgccgaaaaactccttgatggaggccgtcacggggcggatattgatgagcgactgcggggtcacggcgtcgagatcctgcagcgtcatgcgctcgcggatcacgcgctccatgcggctgaagccgatgcggaactggttttgcagcagctcgcccacgctgcgcacgcggcggttgccgagatggtcgatgtcgtccggctcaccgatgccgtgcgccaggcagcacagatagttgatggacgcgaacatatcgtccgcgatgatgtgcttcggaatgagcaggtcgaggttttcctcgatggcttccttgagcgcgtcgccctcgtactgctccatgagctggcgcaggatcacgccgcgcacgagctccttgacgccgagctcggcgggatcaaagtccacatagtgcttcatgtcgaccatgccgttgccgaacacgcggatggacttgccgtccacgtccagatagacgtcattgacgccggcctcggcgatctcctcggcgcgctcgcgcgtgagcacctcgcccgcctcagcaatgatctcaccggtcatcgggtcggcgaccggtgctgccagcgcaaagccggcgatacggccgcgcaggccgagcttcttgttgaacttatagcggccgacgttcgaaatgtcgtagcggcggcggtcatagaacaggccctcgagcagcgtctccgagctctcgaccgtcgggggatcgcccgggcggagcttgcggtagatctcgacgagcgcctcctcgcgggagttgcaggtgtccttgtcgagcgtggcgacgatgcgcgcgtcattgtcgaacacttccttgatctgctcgttcgtgacgacgccggtcgtcatatccgggatacaagacagccaggtgttcgggttgtccgccttgtaggcgcccatggccttgatgaaccaggtcacgggcagcttgcggtttttatcaatgcggcagttgaaaatgtcgttgaggtcggtctcgtactcgagccaggcaccgtggtacgggatgacggtcgtgccgtaggtggagttgtaggccttgtcggtcttcttatcatagtacacgccgggggaacgcacgatctgcgagacgatgacgcgctccgcaccgttgataacgaaggtgccgctgggcgtcatgatcgggaaatcgcccatgaagatctcctgttccttgatctcctcggtctccttgttgcgcaggcggacgctgaccttcagtggggccgcatacgtggcgtcgcgcgctttgcactcttcctcggtgtacttcgggttctcgtccatggaatagtccacgaagcgcagctcgaggttgccggagtagtcggtgatgacgtccacatccttgaacacatcacgcaggccctcttcgaggaaccacttgtacgaattcttctggatctccagaagattcggcatgctctggatctcctcgtgacgggcaaagctcattcgttcggtttttccataggtgactgcctttggcatggcgaacactccttcttttgagattgcgaacacccggtagggttgtgaaatacttttttgacctgttgcattttcgcagcgtatccggtaaaatgtgcttgtaggttgcgggagtagtctctctcgctcccaaagacacatagcgtgatattttaccatttcaacgcataggttgtcaagcacgaatttgtgaatttttcgccggcaggagcgcgtcgccctgccgcttttttgtatcttcggagggatgaccatggatatccgaatctgtctgctgctggctgccgaggccgggctcgcgctggtgctgctgtggagcgccggcgtgctccgaaaaccggcgcacgtcctgtgcgcggtgctgctgctggcggcggcgttcgtgctgcgtgggctgtgcctgaattatgagacgagcgactacacgcagtttctgaccgtgtgggtcaactttttccgcacgcacggcgggctcgccgcactgcgggagtccgttggcaattataatgtaccgtacctgacgtttctggcgctcatcagcggcagttccctgcccgatctgtaccttataaaactgttcagcatcttttttgacgtcgtgctcgcgtggtcggtcatgcagctcgtggggctgttccggcgtgagactgtgtggaagcttgcggcgttcttcctcgtgctcttctggccgacggtcatgctcaacagcgcgctctggggccagtgcgacagtgtgtatgccgccctcgccgtgctgagcgtctatctcgtgctggccgggcatcccgtgctcggcgtggtgagcatcggcgcatcgttcgccttcaaactgcaggccgtgttcgttatgccggtgttcctgctcttctggctcacgcggcgcgtcaagctgcggcacgcgctggccttccccgctacgtgcgtggtcatggtgctgccggccgtcatcgccggacgcggactgtgggatgcgctgaccatcccgtttcagcagacgggcagcatcggcaccgggctcaactataactcctcgtccgtctttgcgctctttacggaggtgcgcgaccccgagatcgccgcaaagctcggcattggcgcagccgtactcgtgatcgtgctgctggccgtctggttctggctgcaccgggacgattgctccgaccgggcgctcgtgctggcggcggcgctgctcgcggtcgcgatcccgtttttcctgccgcatatgcacgaccggtatttcttcgccgcagatgcgctcacgctcgcgctggcggccgcgtggccgcagctggtgctgcctgcagtgctgtgcgagtttgcctccctgctcggctatcacgcctatctgcgcatgcgctatctgctgccgatggccgacggcgcgctcgcactcatcgccgcgctcgtgatcctgacggtcgttctcgcgctggagctgcggcagagatcgccgctgaacgggaaaataaaaaaatcgacctgagtcgaaaatttgtggttgacattccgcgcttttctgttataataactcatgcgtttgaaaagtgcatatgcgggagtgctggaatcggtagacaggcaggcttgaggtgcctgtgtccaaccatagacgtgtgggttcaagtcccatctcccgcaccaagatcgccaaggtacatcgtaccttggcgatcttgtttttcccaagcgcgcaaaaaaggcctccggcggaagatccgccggaggctttctgcatttatgaagagcggcgcaggttatccaacgatgaagtacaggaccatgagcgcgcacagcaggtacatgatcgggtggatctccttggccttgccgcgcacgagcttgacgagcacgtgcacgatgatgccggcgccgaggccgttggtgatgttgccggtgaaggccgtgaacatcatcatgacgcaggggccgatggcctcgtcaaagtccgtgaagtcgatctccgtgaagcccttgagcatcagaaagccgacatagatcagcgccgggccggtcgcggcatacgggatggcgacgaacagcggcgcgaggaagatggtcagcaggaacatgatgccggtgacgagcgcggtcaggccggtgcggccgccggcttccacgccggaggtggactcgacaaaggtcgtgatggtggtgttgccggtcagcgcgccgatgcaggtgccgatagcgtcgacgaggaagggacgctcgataccgggcaggttgccgttttcatcgagcatgttggcgcggttggcgacggccagcaccgtgccgagcgtggagaagaaatctccgaagaaacatacaaacacaaggatgagcccgctcgcggtgaacacgcccttgaaatcgaggttgaacatgacgttgcccagctcgccgaagtccggcacggcggcgacgccgttgagcgtcgtcacaccgagcgggatgccgatgagcgtggtggcaatgatgctgatgaggatggcgcccttgacgttcagggcgttgagcacaatgatgagcagcaggccgccgatggccagcagcacggcgggatcggtgaggttgccgagggcgatgccgttttcaaacgagccgatgccgcagtttttgaagccgaggtaggcaataaagaagccgatggacgcggaaatggcgatcttaatgttcttgggaatgacgcgcacgatcaggtcgcgcaggccaaagaccgtcagcagcacgaacacgataccggaaatgagcgtgatcaccatggcggcgccgaagctcagcgcctgggactggatgagcgcgccgagaatgaagttcgagcccataccggtcgagagtgcaaaggggaagttcgtgtagaaggccatcagcagcgtgatgaggccggacacgagcgcacaggtgatcatgatggcggacttggtgatgacaacgccgttgacatccgtgatgtacgcctcgccgccgcagatcgcggccggctggacggccagcacatacgccatggtcatgaaggtggtcaggcccgcgatgatctcggttttcttatccgtaccgcgcaggctgagtttgaagagtttatccatcaaaagctccttatcctttctctgtctctggttgatttatgcttccgcatccgcaaacacgggtacgaacgtctggttggcgccgttgacgaggcccatatccgtaatgaccacgctcggcagcaccggcagcgccatgatggcggtcgccagcagggtgagctgtccgtcgctgatgacatcgagcgcggactgcacggccgcgatctcgccggcgacctcggcgcagggcttctggctcatgaggccggcagccggcagggcgatgtgcgtctcctgctcgccgtcgatcacgcagacaccgccgccgcacgcgcgcaggatctcggcggcgcggaaggcgtccttcggatcgtggtagctgacggtgaagttgtggctgtcgtgcgaaatggtggacgcgagcgcgccggcgcgcaggccgaagtcgcggtagacggcgatcgtcttgccgccgcggccataacggttggcgcagcagacgaacacgagcgtcggatcgccgctgatgtcgaccacgccgtcacgcaccggcagttcgaccggctcgacgtggcgcaggatgcggttgccgtcctcggacaccatgacgttgacgcggatcgtatcgccggtgtagccctccggcacacgcagctcgaaggactcggggcccgtgatctgcggcagatcgacggtgttcggcaggtcgtagtccgccgtcttgcagtcgccgccgaggtacttgccgtcctccgcgacgagcacgccctcggtgaacacggccttcggccggctgccgtcaagtgcgtcgacgagctggatatcggcgatgtagcccggcgcgatcgcgccgagatcgtcaaagccatactcacgcgcggcgttgaacgtcgccatcttgacgacctcgcggccgtcgaggccggaggcgaccgccttgcgcacgacgttgttgatgtggccgacggtgagcagatccttggcgtggacatcatccgtgcagatggacacgaaatcgcgccacggctgatccttgcagccgtcgacaaggaaggaaaggttatcaatgagggagctggcgcgaaggttgatgtgcatgccggcgcggagcttggcgcgcacctcgtcggcgttcacgctctcgtggtcggacacggggccgccgatgcggtaggccgcgagctcacggccgaagcagtacggcgcgtggccctgcaggaacatgccgcggcggataccctcgtcgatgatggtgtgcatacgctcgctgtcgtgaataacgccgacgtagtccatgatctcggcaatgccgatgacgtcgtccatgtccagcagctcgccgacttctctggcgaggaactccgcgccggcgttttccatgccgggcaaggacgggacgcacgacggagcgagcacgtactggcggagcttggactttttcgcattctcaagcatgaagcgcacgccgtcgagacccatgacgttgccgatctcgtgcgggtcggtgcagatggtcgtcgtgccccacggcagaatggcgcgggcgagattttcggggatcatcatcgtgctctcgatgtgcatgtgcgtgtcgatgtagccggggatcaggtagcggccctgaccgtcgtagtacgatttggacggcaggactgcctcctgcccttcctcacgcaccaaaacaacaaatccgtccagtatgtcgacactggccggatagatttctcccgtaatggcattgaaaaactgtacgttgccgatcgtcagatcgcacgggatctgacccatggccgcctgaatgaggcgcgagcgatcctttgccttgcgtgtacgcatcaaaatccctccctgaaatcataagctgctatcaaccataaaaagcgtttccgctctctatccaaataaaaaaacggcggagcgtctgcgatctgcgaccctccaccgaaacggaaaagctcacacagcggtttggcgctgtgcgtgctgcattccggtagtcgggcaattcaagggccgcccggtagagacgcggggcccatgtgacttccccgcctatacctgaaagtgtctgtgttcacttgttggaacgccttgattataaatccggcggcaccgaaaagcaattattcaagaacctgaaataatcccggtctttcgatttttctctatccatttcgctgaatttccttccaaaaaatgaaagtgtctccgaccggcgtatgttcgtccggcagagacacattcctgcattatgtcttttatgcgcttacgcgccgcgcagcagcgccacggccgagcgcgcggccgtggccgcgtccgggcagtagacgtccgcgccgatctcgtcgctgtagccgggcgtgatgggtgcaccgccgacaaagatcttcacccggtcgcggatgccgcgggccttcgccagctccaccacatcgcgcatttccggcatcgtcgtcgtcagcagcgaggagcaggcgatgatgtcgcagtgctgttcgatcgccgtgtccacgaactgctccgccgtgacgtccacgccgaggtccacgacctccagcccgctgccctccatcatgatcttgacgaggttcttgccgatgtcgtgcatatcaccgcgcaccgtgccgaggcagacgcggccgatcgtctcgctgctctcccccgtcatgtacggcttgagcagctccgtcgccgccgccatgcagcgcgctgcgatgagcatctccggcacgaaggcgcggttggccgaaaaatcctcgccaaggatggtcatgccgcgcacaaggccgtccgtgaggatctcctgcgcgccgtgcccgctctcgagcgcctcggagcacagctgcagcacgcgcttttgctgcccgcgcacgagcgcggacgcgatgcgcgagagcacatcgccctgcggctgctcggcctcaggcgcgctctgcgccggcgcggccgcggcgtgcacgctccggcgcggcacgggcggcaggtgcgtcaccggcacatgcagcgctgcgttgtattcatcgaccgcctggttgaggtatttgtccacgtgcgggtagacagtgcccgccaggccgtaggtgatcgaggggatgtagtgcccgccggggcagttgcgcttgagcacatcgcgggcataggtgaggatgtcctcgggcgtcgcgtccttgcggtcgatggccgcgccgaagccgcccatgagcgtgagccgcccgtttaagtgtgcctgcagggcgggaatgtcgttttccggcaggacgccctgccagacctggatgccgatctcggccatgtcgtccacgatcggcacaagataggagtccgcgtggtggatggcaatgacgccgcgcgaacggatgtagccataaaaccggcggtacggctccttgaagaattcccgccacatctcgggcttcatgaacagggcgtttttcgtgccccagtcgtcgtgcgaaaagatgacatccggctgcagatggtcgatgagcatgcgcacatacgtcaggcggtactccgtgatgtagtcaataagcgcgtgcatctcgtccggatgcgcgtagagattcgtgagcgtgtcctcaaagcccatgaggaagtggcactgctcgaaaatgcccgtgcccatgaacccggccaacaggtgatccgacccgcaggcggcgcgcgcctcggcgcggcaggtgtcccacccttccgtgcaggcggcctccagatcgggcgcgtgcaccgtctcgcgccagcgcgtgacgtccgggcagacggcaaggccctcgcgcgtatccggcatcgggccgggtgcatcctcgggaaacaggatcgtcgtgccccagcggtccacgctcgtcgtgccgcgcttgcggttgccgcgcaggtaggtgttgcacgggtcggtgaggcacatgtgcagcgcctcatactggcgcagctggcgctccggctggccgtcgggccggatgagctcgaggaagatctctttcggtgtggacatggttttcactccttgttgtataaaacgcaggatgtatacgtcatggtacgcgggccgtagttgtaggcaaggcccgagcgcgcgcagatatcgctcacgaacagaccatacgcctccatggacgacaggcgtttggtcgggtagcggcacggccggtcgggatacgtgcagcgggcacagagcgtgcagctgccggccgtcagcggcaggcagccgggacagagtcggcgcatctggcgtgcaaagtcggcaaagcggcgcttgtgcgcgcgctcagtggccgcaatggattcgtaatcgaaatcatcgcgcagcgtcccggtcgtctgtacaaggatgccggcgtcaaagcctgcgatgcgtcgcgcagccgcctcgatgctgccgcagccgggcgggcaggcccagttgtgcccgtatcggccgcagcggccggacgcgcacatatcgcgtaccgcctcgagcggcaccgccgccgccatattcagctgtgcccagtgggaaaagccgttttgcgcggccagcgtctcgggatcgttcatatgcaaagcctcttgacaaagcaaagtctcactgcttagaatgtgcctatatcttataagggggcggcggccatgtcaagcatccaaattgaacaaaacggccatgtccgcaccattcccctgccggccggcgagacgctgctgtccgttctgcggcgcgcgggctattccattcccgccgcctgcggcggaaagggccgctgcggcaagtgccgcgtaccggtcaacggcgtgccccggctcgcctgccgggtctatccggcggacggcgacaccgtcacgctgccagagaccgccggcggcacgatcctgaccggcaccgtgccgctgcccgcctgccgaccgggacgcacaggctgcgccgccgccgtcgacctcggcacgacgaccgtcgtcgcgcggctgtacgatctctcgtccggcacagagctgcaaacctgcagcggctggaatgcgcaggccccttatggggctgacgtcatcagccgcatccagtatacgcttgagaagccggacggcctgccggagctctcgcggcgcatccgcgagcagatctgggcgctggtatcggacgcgctcgcgcgcagcggccgcacgccgggcacgctgcgcgagatcacactcgccggcaacaccgtcatgcagcacctcttcgccggatactccgtgcgcggcatcgccgcagcgccgttccggccggagacgctctttgcagcacccggagacgaaacgctgcacggcgtgccggtgcactttgctccctgcgtggcgggctacgtcggcggggacatcacggccggactgctggccgccgggctggcggagctgccgggcgagaacctgtttctcgacatcggcaccaacggcgagatggcgctcggcggccgcggcgggttcgtctgctgcgccgtggcatccggcccggcctttgagggtgcgggcatcacgtgcggcatgccgggcgtggacggcgccatcagccgcgtacggtatgaccgcggctttctgtacgatgtcatcggcggcggcgaaccgaaggggctgtgcggctccggcctgctcgacctgacggcggtgctgctgcgcctcggcgtgatcgcgcccggtgggcggctgctgccgccggaggacgcaccaatgcccctgcgccgctatctgacgcgcgatgacgacggcaacggccgctttcacctgacgccggaggtatctctcacggcggcggacgtgcgcaacttacagctggccaaggccgccgtcgcggcgggcatccgcgtgctgctgcagcagcgcggcatcgcaccggagcaggtggacggcgtgtaccttgccggcggcttcggcagctatctcgaccccgagagcgccatggccatcggcatgctcccgcgcgcgtgcgcgggcaagctgcacacgctcggcaacacggcgctcgccggcgcggccgcgctcacgctcgaccccgcgcagtggcagcgcatcgggaatatttcccgggcatgcgactatctggagctgtccggccgcgcagattttgccgcggcctttaccgacgatctgtcgtttccgcaaccataacatttcacggaggtcatgaccatggagatccgttttcccctcatcctcgacggtgcgaccggcaccgaactgcaaaagcgcggctacggcggtgatgtgagcgccgagcagtggacgctcgagcacccggacgtcattgtgggcatccagcgcggctacgttgccgccggcagccaggtgctctacacgccgaccttcggcgcaaaccggcagaagctcgaggagcgcagcatcttcaaccagacggcggactacaaccgccgcctcgccgcgctctcgcgcgaagcggcgggcggcaaggcatggatcgcgggcgatctcgcgccgacgggcctgtttctcgccccgctcggcgaggcatcgttcgaggatctggtcgatatctacaccgagcaggcggccggactcgaagcggccggcgtcgatctgtatgtcatcgagacgatgatgacgctctcggacgcacgcgccgccgtgctggccgtgcgcagcgtgagcgacaagccgatcttcgtgtccttcacgtgcgacgagagcggacgcagcctctcgggcacggacgtgaccgccgcgctgaccgtgctgcagggcatgggcatcagcgcgttcgggctcaactgctcgaccgggccggaacagatgctcgtgcagctgcgccgcctgcgggaatacgcccgcgtgccgctgatcgcaaagcccaacgccggtatgcccatcaccgtcggcggcaagaccgtatatgactgcacgccggaggaattcacggcgttcgtgcagccgatgctggaagccggcgtggccgttttcggcggctgctgcggcacgacggcggagcatatcgccgcgctgcacgcggccctcaaggacgcgaaattcgtcccgcccgcaccgaagcacacggacctgctcccggccgcgacggagaagctcccctgctacctgccgacggacgccgggcacggccctgtgctgaccgccgggccggatctcgaagaccggctggcggatgcgctcgacggcagcgagcccatggttgcgctgcgcgtcgctgcctgggaggacatcgacgcactgaccgacgtgcagtatctgctgagcaagccgctgtgcctcgtctgcgacgacgcggagctgcttgaggccgcactgcgcgcctatcagggccgcgcgctgtatgagggcgcgctcccggagtcggcgctgctgccgctgtgcggccggtacggcctgttgatttgaacagtcgccgcccgaggtggtaaatttcgcagcgaccacacgccctcagggtaaaaaagggacgcaggaggatgctgcgtctgccggacggcctgtacagaaacgcgcagtttcttagcgctttttgtgacagaaaagcgtgaaaaggcaacagttttttgttgacacggcaagttttctgtgaaataatgaacctgtactacgtaggtacatccggtgctgtggggtacaccgcgtgggacaaccgttatgagaggaatgaccatccctcataaacaggaacggagcagatacatccccccgtatctgctccgtttttctttttaaattttacacttccagccgctcggcatatttctttccgccgacggacagcaccgccagcatggcaaacacggcggcaaagcccagcgcatcccagaccgtgaacggcgtatccagcagcgtcacggccagaatggccgccgtgaccggctcggcaaagccgtagagcacgctcttttccgggccgatgagcttcacgcccgtcatatacaggttgaaggccagcaggttgccgaagagcaccacgaacaaaatgccgccgacaccgcgcagtgacggcgtatagccgagtgtccacgggtgcatggacagctcgaagagcacagcccccatcaaaaacgcccacgcctgcagcagactgaccggataatcgtgcagctcccggcgcggacagaggcagttatacaccgtcacgcacaccgcgcacgcaacacccgcgaccagcgccactggcgacacggcaaacgtcgtcaggtcgccgtgcgtggtcagcaaaatcacgccgagcagcgccagcacgatgctcacgatctcatacgcgcgcggctttctgtgcgcagtcgcgcaggcgaccagcagcaccatcaccggcgacagatcctgcatgatcgtgccgatggccgcgttggaaaactgaatggtcagaaaataaagaaactggctcaggctgatgccgaaaatgccatagagcacgagcatcaccgcgctatcccgctgccgccacggggcgaacagcagccgccggtccttcaccagccagtagacaaacaaaatcaggcccgccaggctcagacggatcgggatcagccacgtggtctgcatggcctcgtgcgtaaacagatactgccccatcgtgccggaaatgccccagcacacaccgccgcccgccgccattagcgcacctttgagctgtcggctcattgcaaacatcgacctcgctctccaccggaatacgcgctattatagcagacagcgcccacggcttcaagcgccgtttttcacgattcttttgcccgctccggcacaccggcaaggcaaaacggcagttccagcgagtgccgctcaagcagcgcccggtcgcgcaggatctcccccgccggcccatcggccgcgatctgcccgtcgtgcagcagcaggacgcggtcgcacgtctcgagcacgaggtcgagatcgtgcgttgcgatgatcttcgtcaccggcagcgcattgagcgtgcggatgagcgtgcggcggtttttcgggtcaagcgccgtggacggctcgtccatgagcatgatcttcggctgcatggcgaggatggtcgcaatggcggccatgcgcttttcgccgccggagagcttgtggttgcggcggtttttcaggtgcgtaaggttcagctctgcgagcgtttgatccacaagtgcctccgcctccgggcggggcatgccgtaattgagcgggccgaagagcatatcctcaaacaccgtcggcatgaacatctggttgtctgagtcctgcaggacatagcccagccgccggcggatgtccgcgaggttgtcacggttcatctccagaccgtcgatcgtgatcgtaccggagacggtgatgagccccagcgccgccttcatgagcgtggacttgcccgcgccgttggcgccgatcaggccgacctgctcgccctcggaaacggaaaacgacaggtcatttaagatcgtgcgctcacccggataggcaaacgaaacatggtcaaaacacagcatatgcgcccctcctcaggcaaaaagtccgcccagcagcgccggcagattgtacagccgcgccagcacgatcagcgccgcacacccaatggcaaacggccacgaggcccgactcgacggccggccctgcgcgtaatgaaactccccgtgatagccgcgcagctccatgctctcatagagcgcggtcgcgcggtccatgctgcgcagcagcaactggcccagaaacgatccccaggccgagatatgcacgcccttctgccccggcgcacgcagacggtaggcatccgtcatgatggccgcctcgtcgagcagcacggagatataccggaatgtgagcagcagcagcgacgtgagcaccttcggcacgtgcagctgccgcagcgcgcggcagatatcctcgatgctcgtcgtcgccgcgagcaggaacgacgccatgagacagaagatgcccttcatcatcagcgtcagcatggagatcacaccgccgctgacgccgaccgcgccgatgtacagcacgatccgcttgtcaaagaaggggttgaacagccccaccgcgcacacgagcggcatgaccacgcgcagcttgtgaaagcacgtatgtaccgggatcatgccgacctgataaccgacgagcggaaagagcaccatgacgaacacgcccgagatatcgtacttgtgaaacgagaccgtcacgacgatgtagagcacggtcacaaagagcttggacagcgggctgagccggtgcatcggcgaatcctgcgccgccagctcgtccatggcccgcagctcgacgctcgcttgctgcgctttgttcatgtgtgctcacctccccgtttgtacaaaaacgcccattgcggcaagccccgagaggagcttgccgcatgggtcgtatttggatgcctggtatcgagattattgattattgcgaatggtttttcttatgccggcagatgccgccgacaccgcatataagcgccgctgccgccgccacgatggcagcgcccgcgatgccggacacggacgtgcccgccgcggaatcgctcccggcgaaggaatagtccggcaggaacgccgtcttttcctgcacggtgccggccttgtcggccgcgctactctgcacgccgtagctgtcctcgtcgaggcccatgttctgcgtgtagccggcgtcgctgttgccgaacagcgaccactccagcccgtcggggttgccgctggccaacagcgacaagccgccgccgacgagcaccgccgcgatggcgatgaccgcgatcgtgcccttgaacgaggccttgccggtggtttcgccgctcatgcgcacatcgcgcagcagctccggccgcgcctcatagaggaacagcagcaccgccgccgtgatgaggccctcgatcaggccgatggccagatggatcggctgcatgatggcgcagaacgcgccgaacggcagatccgtgatgccggagagcgtcgtctccagcacgaccgagaacgcgccgagctgcagcgtcagcacgcagccgagcacggacgcaagcgtgatcttgaggcggttcgccgcccgctcgccgcgccgcgcaaagcagcggctgcgcatcagcggccggtaaatgagaaaatatccgacgaagcagccgtaaaacgccatgttccagacgtttgcgcccagcgccagcagaccgccgtcggcaaagaacaggcactggatcgtgaggatcacgatcatggacaaaaatcccgcccacggcccgagtacggacgtgagcagcaggccgccgcacagatggccggacgagccggtgccggggatggtgtagttgatcatctgccccgcgaacacgagcgccgacatgacggccatggtcggcaactttttggccgctgaggtcagatcctgcttttcttccttgtgcagctccacgatcgaggcccccgcaacgaccgcagaagcggcgtacatcacaccggcgaccgccggcgtgagcaacgcatctgccatatgcataggatgcaccgccctttcccttcgtttcttatgacaagattataacgcaccagtcgcttcctgcacaagctcccaggggggatgcgttgctcaacacttttccacgccgtgatgaaaaacgcaaaaaagttggcgccggatgcccatacatccggcgtcaaccgattttttcagggatgggcagcgtcgtgccgccggttatagagaaacatgccgacgcccgcgccgcagatgagcacatagcccaagacgctgagccagtccggtacatcaccaaagacgaaaaagcccagcgccgcggcaaagagcacctgcgtatagtcatacaccgagatctccctggccggcgcgcagacataggctttcgtgatgccgagctgcccgacgcacgcgaacgcgcccgccagcagcagatacacgagctggagcaggctcatcggcgcataatccagcgccacgaacggcacgcacacgatgcacgaaaacgccgagaagtaaaacacgatccggctgccgttttccccgcgcgcgccgagataacgcacgaacgtatacgcagcgcccgcgcccaacccgccgagcacgccggccagcgccgggagcatctggggattagcgaagctcggcttgatgatgcacacgctgccgccgaaggcgaccagcacaccaaggacctgcacaaggttcggcttttcgcgcagcaggaagatcgaaaacaggatggcgaaaaacggcgagagcttgttgagcatgttcgcgtccggcaggttcagcttgccgatggcatagaaattgcacagcaggcccagcgtaccgaaaaagcaccggccgaacagcgccgggagattgcgccgctccggccggaacgatgtgcggctgcgcagcatgaggatggtgataaaaatgagcgcgacaaagttgcggaaaaatgccttttcaaacgacggcagatcgcccgccagctttatgaacatggacatgagcgaaaagccgaacgccgcaatgaggacatagacgatgccctgtgttttttgactgagtttttgcataacggttctctcgattccgacaaagtcaccctattatacagcgctcccccgccctgtcaagtccggccgggcatgaaaaaggcgcccggccggacaccggacgccttttcgatagggggatgaaaggaaaatgagagatgaaaggatttaacgattttggccctcgatcactcgatctcgaggtgcttggactccggctttgccggggccttcttgggcatggtcagcgtcaggactccgttttcataggcggccttgatgccctcgacgtcgatctcggacacgttgaaacttctggagtaagaaccgtagtaacgctcgcggcgaatgtaatcgcccttgtcgtccttttcgcccttgctgtccttgtgctcggcatggatggacagaatgtcatcgtcgatatcgatgtggatgtcttccttgcggaagcccggcaggtcggcttcaagcttatagccgtccgccgtctcggaaatgtcggtgcggaacggattgacctgctggtcaccccagaaattcttctccatctgttccagctcgcggaacggattgtagctcatacgatagcttctgcggtcaaaaggcatgatttcgaacattttatattcctcctagaattctatacacggtaatcattttctcgagcgttcgatttatttctctcgctctttacgatatataaattactatacaattatgaataaataaagtatatatcatgaacaaaaagtaaacgttagcactcttttgattcgagtgctaacgtttttcatgctttccggtagatcaggagggcaaattcagtttccgtggtcagggtgtcgagcgcgtggagcttggcctggtcgcgcgcgccgctcttatagtaatacggcgtcatgcaaaacagtgcctcgatgtcggcgttcgtgcgcagggtgatcgtgccgcgcagcgtccgctgctctgcgagcgcgaagccgggcagcgccgggtcgggaacggtgttttcatacgggtggtcgtacaccgcccgcttgagcccccagagatggcgctcgagcgggatgacacgcagcagcaccccttgggggcgcagcacgcgcgcaaactcagccgcgtcgtgcggcgcgaagacattgagcacgaggtcacagctcgcatccgcgaccggcaggtgcgcgatgctggccacggccagcgtcagctccggcgcgcggcggtgcgcgcagatgagcgcatcgcgcgagatgtccacgccgcacacggaggggcttgccccctgcgcctgcagcgtgtgcaggacgtgggcggtgtaatatccctcgccgcagccggcatcgagcacgcctgcatctccggaggtgtattccgtcgcggcggcagcgatggcatctcgcagcggcgcgtaatagcccgcgtccagaaacgcggtgcgcgcggccaccatgcgcttatcgtcgccgtgacgcttatccttggatcggttcgtgcgcagcagattcacatagccctgccgcgcgagatcgtaacagtgccctgcgccgcagcgcagggatctctcctcccggtgcagcgcgccgccgcagacgggacaggtcagttccggcattctggctcctttccgcagaaaaccgcgcagccggtcaggctgcgcggtcgcaatgtcacttacagcaccttggccaaaaagtcctgcaggcgcgcgcactgcgggtgctcaaagatatccttcggcgtgccggactcggcgatcttgccgtcggccatgaacaggacacggtcgcccacctcgcgggcgaagcccatctcgtgcgtgacgacgaccatcgtcatgccctcgtgcgccagctccttcatgacatcgagcacttcgccgaccatctcggggtcgagcgcgctcgtcggctcgtcaaagagcatgaccttcgggtgcatggcgagcgaacgcacgatggcgatgcgctgcttctggccgccggagagtgcggacggatagctgtcgccccggtcggccaggccgacgcgggcaaggagcttgtccgcctctgcatccgcctccgcctgcgacatgagcttcgtctgcacgggcgcgagcgtgatattcttgcgcacggtcatgttcggaaacaggttgaagtgctggaacaccatgcccatctggcggcgcatggcgtcgatattcaccttcgggtcggtgatctccgtgccggcaaaggtgatggtaccggccgtcggctgctcgagcaggttcaggcagcgcaggaacgtcgacttgccggagccggaggggccgatgatgaccacgttttcgccggggctgacgtgctcggaaatatcatcgagcacgaggtggtcgccgaacgatttggacagatgtttaacgtcgatcactttgacgcagcctcctttcaagcacaccgagcagcttggaaaacagcatgaccagcagcaggtacatcagcgcgatgccgaacagcgggaacaggccctgatacgtcttggcgatgaccgccttggccgcataggtcatctccttgccgccgatgacggtgatgagggacgtatccttgagcagggtgatgaactcgttgccgagggccggcaggatgtttttgatcgcctgcggaatgacgatgaagcgcatggtcgtgaagtagttcatgcccaggctgcggccggcctccatctggccggggtcgaccgacatgaggccgctgcggacgatctccgagacgtaagcgccggagttgatgccaagggccagaatgccgatcatggtatagttgcggctgctggcgaagatcacgaggctcatgatcagcagctgcaccatcatcggcgtgccgcggatgatggtcgtatagatcttgcagatggcgttgaacacgccgaggatcacattcttgtgcccggcgcgctgctggtcgtgcgccgtgcggatgaccgcgacgacgacgccgagcacgacgcccagcagcagcgccaggatcgtcgcttcgagcgtggtgagcaggccgttcagatacagtctccagcgtccggcggccacaaagctctggtaaaagccgacgaaggcgttgtcccagaagccgagggcctgcccggcctgcagctgcgccgtcaggtcggcgtaaagctgcgcccaattacccatgtagatacctctttctttctacgcgcaaagggcggcagttggccgccctttacgtggtttgcattttggatgcgattacttcgcggaaatatacttgtcgatgatggactggatggtgccgtccgccttgagctcggccagcgccttgttcagggcttcctgcagcgcggtgttgtccttagccatgccgatggcgtaatcctcgttggcgtactcggtgtccagaatggtcagaccggcgttcgccttgacgtactcctgagccggcgctttgtcgatcacgacgcagtcgaccttaccggcgagcaggttctgcacggcggtcgcgccgtcatcaaagggaaccacgctgtcctcgccgtaatcatcgatgcaatagctataaccggtggtgccgcgctgggtgccgatctgcttgccttcgagatcatcaatgctcttgatatcggagccttccttcacgatgacgacctgaacgccgttggcgtagctgtcggtgaagctcatggtgttctgacgctcgggcgtgacggtcacgccggcggcaacgatgtcgctcttgccggtctggacagcgctcagagcggagtcaaagtccatatcgtcgacgaccagctccaggcccagcttctgcgccagagcgtaagcgatctcgatgtcgatgccttcaaagccggtgccctcgtagcccttgccgtcgtccgcaacggactcgtacggcgggaactgcgcgttggtggacatggtgagcttgccggcggtcacggtcttgatgtccgaacccgtctgggtatccttctggccacaggcgcacagagatgcgaccatgaggactgccagaagcagtgcaacaaatttcttcattttattagcctcttcctcaaacaaaatagattggggctcgcgccccgtttggtatggtcgtatgatagcacgcgagcgtgaggctgtcaagcattttcgtgcatgaatattcggatttctcccttgaatattcacaaaacgcgcgaatattcagagaatcaatgaatatttgcagccgaattcgcgcttttgcacaatgcggcagaggcgcgcgtttgaaaaattgacagttttgtgctatgctcttttcacgcattttacacgggaaacggggactttttcatggataagcgccactatgtctatcttctgcgctgcgcagacggctcgctctacacgggcatgacgccggacattgcgcgccgcctgcggcagcacgtcgcgcgtctgcccggctgcgcgaagtacacgcgcagccatccggtcacggcgctggcgctgctgctgacgaccgacaccgccacgaccgcccggcagctcgaggcgcgcatcaagcgcctgacgcgcgcgcagaaagatgcgctcatcgcagatccggcgtgcctgcccgacctctgccccgctctggccggggcggatatccggccggtgccggacgcaaagctcgcagaccatctccccgacatgacaaacccggcagacgcctgagcgtctgccgggttttccttatatcatgattccgctgattcagcgcagaccgcgcagctccagatagcggagcacgagcttggcaacgtcgctgatctccagcccgtcggtattgacgcacaggtcataggcctgcgcatcgccccagcgcttggaggagaagaagttatagtacgccgcgcgctccttatccacctggcggatgcgcttttccgcttccgcgggcgtggtgttcgtgcgtgcactctcgcggcggatgcgggcagccagcggcgcgtgcacaaacaggttcacgagcgcaacgttcggatcgtcgcgcaggacatagtccgcgcagcggccgacgatgacgcacggctcgcgcgcggcgatcgtgcggatgacctccgactgcgcctgaaagatctgcaccgggaacggctgctcgtcggcgacaacaccgccgcccgtcacgagcgaatacaggaagctgcccggacggtgctcctcatgcgtctcgacaaagctcttggcaaagccgctcgctttcgccgtctcgttgatgagttccgagtcatagcacttgacatccaacgccgctgccagttcgctgccgagctggcggccaccgctgccgttctctcttccgattgtaatgacaagattggccatggtatgatctcctcctgttttattttcccgtgacgacggcattgacgcgccactggtcaaagcggtgcaggatcgctgccgcctcggcgcgcgtggcaacgccctgcgggcgcagatacgtcgcgttttcatcctgcacacctttaataagtgagttggcaacggcccagcccatcatggtctgcgcccaggacgaaacgctcccgccgtccgcaaacgcgctcaggtcggcgaccgccatggtgttgtaatccatgaattcggcatagccgtagaacattttcgtcatctgctcgcgcgtgacgttttgtgcgggggcaaattgcgtcgggctcgtgccgtcgacgacgccgcagttatacgcccagatgacggcgtccgtgtaccactgaccggacggcacatccgtgaacggtgcggtcatgcccgccacgctcggcgagccgttcatccggtagagcaccgtgacaagcatggcgcggctcatcacggcattgggcgagaacatcatcgttgaggtgccgaccatgagcttgttctgcgtgacataggccacgtcctcatagtaccacgcggtgctgcgcacgtcgcggtagggatttttccatgtctcgaccggttcggtcttggggaggaattcatagcgcagcttggcacagcgctggcaggtgtaggtgatcacgccgacggtcttgctggtcggctcctgccgtgcagtctcagcccatgcgtggccgagcgcgggcacatagctgctctcttcaatatacgtatcgccgcaggcgcaggtgtagcgcgtgtagccctgctgctcacaggtcggatctatgaccgtgggaatgtggttgtgcacatgatccagcttctggatcgcggcatcctgccgctcgccgcagaccttgcagatgcggtgctgcgcgccgtcggtctggtccgtggcctgcttgtccacaatccagtcgccccagtcgtggccctttgccgggatgcgcaccagatgcacatccccgcaccggccgcagacataatactccgtgcccggctgcgtgcagtctgcttctctgcttttttccggcttgagctcgtaattgtgccgcagcggatcgataatctccgtataggtgtcgccgcagcgggagcagttatattccttcaggccgctcgtggtgcaggtcggctcgacgatcgtgcggatgccgctgtcgccgctgtagtcatggccgagcgccggcgtgcggctgccctcgacgatgtagtgctcgccgcacggcagacccgccttgttgatgcagcggtactccgtgtagccctgctcagtgcaggtcggctggacgacgtgctttttcatggtgtgctcgtggtggtcgctcgggatggcatacgtctccacctcaccgcagcgcatgcatgtgcgctgcttgataccatcccgtttgctgccggcttccagaag

SEQ ID NO: 13955 - DNA, 225438 bp, Unknown
  gut microbiota DNA sequence
cactgcgtgcacatgtagcgctgataaccgtcctgcgtgcaggtggcatcgtgcccggaagaaaccagcttgtggccggtcatgggcagcacgacccggtcggtcgcgccgcagtccttgcacacagagacaatggagccatccaccgtgcaggtgggttcggtgcgggtcgtctcccagttatggtcattgagataggcgaaattgatatggaagcccgtatccgtgcgcgtgatctgcgcatcgtaatgctgcagcgtcgttgtcgtcaggacataggtgatctcgttgccgtaatcatcgtggatgggcaggttgtcaaagacggcctgtccgtcctcgggatcggacgaatggtgcgccacgaccacggcatcgttgttgcggctcagctccatgtacacgctcgtcggccggtccttggtatagacctcatcgggtgcgatctgctcgttcgtccactcgaacgtgaccgtgatcgagcgcagctcgctcgggtcggccgttttgtagtgcagcgtgtgatcgagccgcagcttgccgttttccacgtcgggcaaaatgcgcgcgccgtccttaatgatatacgccaccgaagcgtcggacgccgtgcgcgtctggatgtaatacgatttgccatacggcaccgtgccgaaaccgacgaagccataggcgtcggacacggccgtgcgctcgatgtgcttgccgttgtcggacgtgccggtgagttcaaacgtcacaccggccgggatcggcgcgccggtctccgcgtcgacggcatagaaccacgcgacgtcggacgaggcgctcagcggcgtggaggccagcgacggcttttcatcctgcaggtagtcgaacgtggagtacatcgtcggcgaccagctcttgttcttgaaattcgtgacgagctgcgacttgtcgccgttggacttgcggatctccagttcctcgagcagcgtcgtcaggtacgccgtaccgccgcgcgtgacggtgaacgaaatgttcgccatggtctgcggcgacgtggtggcaaactcgccgccctgcgatgtcgtgaacgtatcgtggaactcaaagtcgcccgcgttgtttttcgtcgagggcgaggtcatgttcgggaacttgcagccgtcggcattgaccgacaggcactggctgtcatacagcacatggcccgtaatctcgttgacggagccggatgtcagccggaaccagtaggtatacgaaaaagtatcgccgacatgaaatgtccgcgttgcgccggagcgcgtgtagacgaccagctcgtcgccggtgtccgcaggcgtgtcaccgtcagcggcgaacgcctgcaggccgcagacggacacgagcatgaccagcgtcagcagcagcgccaggaaacgtttcattgcattacctcctctttcggtcgtgccgaatcgtacagggatacggttttatcatatcagggatttgcgcatgatgcaaacaaaagttgcaaaaaaatgacgaatttaaaacagactcatctggctgctgtccggcatctcgccgagcgcgcccatggcgcgcagctgctccaggtgcgtctggctgaccttcgggcaggcagccgagagctcctcgaccgacacgaactctcgcccgtcggcacggcaggccacgagattccacgccgcgctctcaccgagaccggagatggccacgaacggcggcaggagcttcccgtcgcggatgaggaacttcgtcgcgtcgctctcatagaggctcatgggcgcgaactcaaagccgcggaggttgaattcgtacacggcctccagcgtcacgagcaggtcctcctccttggccgtgagcgtgggcttgttgcgcagctcgttgatcttgcggcgggtgtaatcgaggccgcgcgtcatcatgtcggcgtcgaacgaatccttctggctgcggcgatagaaatatgcgctgtaaaacgccagcggctcgtgcaccttgaaccacgcgatgcgaaacgccatcatgacgtaggccaccgcgtgcgccttcgggaacaggtaggcgatcttgctcagggacgtgatgtaccactccggcacaccgtgctcctgcatcgtctcgacccagccgtcctggaagccgccgcgcttgaccttgcccttgcggacgctctccatgatcttgaacgagagcttggcgtccataccgcggctgatgaggtagagcatgatatcgtcgcggcagccgaccgtctggttgaccgtcgccgtgccggacatgatgagatccttcgcattgccgagccacacgtccgtgccatgcgagaacccggacagacgcacgaggatgtcaaagcccttcggctgcgtgtcgacgagcatctggcgcgtgaagcccgtgccgaactccgggatgccaatcgtgccagtcttgccgacaatcgggtcgtcgtccgtcaggccgagcggcgccgcgctgcagaagatgcccatggtgtccggatcgtcgagcgggatctcgcgcgcgttgacgccggtcatgtcctcaagcatgcggatcatggtcgggtcatcgtggccgagctcgtcgagcttgaggaggttcgcctccatgcagtggtattcaaaatgggtggtgatgatgtcgctgttcggatcatcggccgggtgctgcacggggcagaaatccgtgacgtccttgtcctgcgggatgacgacgaggccgccggggtgctggccggtcgtgcgcttgacgccgacgcagccgagcgcgaggcggttcatctccgccttcggcagggtcttgccgcgctcctcgaggtacttgaggacatagccgtaggccgtcttttccgccagcgtgccgatcgtgccggcgcggaacacgtgatccgagccgaagagctcttcggtgtatttatgcgccttggcctgatattcgcccgagaagttcaggtcgatatcgggcaccttgtcgccgccgaagccgaggaacgtctcaaacgggatgtcgaaaccgtccttgcgcagcttcgccccgcacctggggcacaccttgtccggcatatccgcgccgcagccgaagcccgcgccggagtcaaagtccgtatacttgcactgcgggcagacatagtgcggcgggagcgagttgacctccgtgatgccggagaaatacgccacgagcgacgagccgacgctgcctcggctgccgaccagatagccatgctcgagggagttggcgacaagtttctgtgcgctcatgtaaatgacgtcatacccgcgcgagagaatgtcgtgcagctcggtctcgacgcggtcggtgatgagcttcggcgggttttcgccgtagatggccgtcatcttgccatagaccaggtctttgagctgctgggctgagttttcgatcttcggcgggtagagatccttcggcaggagctcgaacacctcgacgctgtcggcaatggcgttcgtgttcgtgacgacgacctcctgcgccttttcggggccgaggtaggcaaattcgtcgagcatctccaccgtcgtgcggtaatagagcggcatggccttgtccgcgtcggagaatttcttggccgccagcaggatgcggcggaagatctcctgctcgggatcgagaaaatgcacgtcgcacgtcgccacaacgggcttgccgagctcctcgccgagctgcacgatgcggcggttgaggttgcgcagggattcctcgctgcgcacggtgccgttgtcgagcaggaagtggttattcgccagcggcatgatctcgagatagtcgtaaaacgacgcgatgcgcttgagctccgtgtcgctcttgccgcgcagcaccgcctcgaacacctcgcccgcctcgcaggccgagccgatgatgaggccctcgcggtattccataagcaggctcttggggatggtggggttgcgcttgaaatacttcagatacgaccgggaaatgatctcgtagaggtttttcaggccggtcttgtttttcaccagaatggagatgtggtgcgtgcggcgcttctccttcaggccgccgcgcacgagatcgttgaagtcgccgatcgtctttgcgcccttcgccgcgagcatgggcaggaacttgtccatgatgcgcgccacgaccattgcatcgtcgcacgcgcggtggtggttgaagtccggcaggctcaggcggttcgagacctggtcgagcttgtggtgcttgagatccggcagcaggtactgcgcgagcaccagcgtgtcgagatacaccggttcgaacgggatgcccgcccggcggcaggccgcgctcatgaagccggtatcaaagtcggcattgtgcgcgatgatcggccgtccgcccgcaaagtcgagaaactggcgcatggcctccgcctcgtccggcgcgccggccacatcggcatccgtaatgccggtcaggcgcgtgatctcggccgggatgggcatgtgcgggtcgacgaacgtgtcaaactccgccttgatctcgccgccggagaagagcaccgcgccgatctccgtcatgcggtttgtgtccaggtgcaggccggtcgtctcgatatcgaaggcgataaactccgcgtcgagcggcaggtcgctctgcccgtgcacggcgagcgtgccgtccacgtcgttgacgaggtagccctcctcgccgtagatgatcttcacgccgtatttcttcgacgccttccacatatccggaaacgcctgcgccacgccgtgatccgtcacggcgatggccgggtggccccagtaggccgcgcgggccacgaggtcggcggggtcggagatggcgtcgagcgccgaatagcgggtatgtaagtgcagctccacgcgcttttgcggcgcgttgtcggggcggatgaccttctccccctgcacgatgttgcgcggctcgagcaccatgtcttcatcgtatttgctgtagttgatcttgccctgcacacgcagccacatgccctcgtggatcatgccgacgatgctctgatcgtcgtccgagcgcagaaagcgcgacacgcgcacgctgcttgtgctgtcggtcatgtcaaacgagagcacggccgagccgtactttgcaatctcgcggctgttgacggcaaacacctcgccctcgagcgtgacattgccgctctcgagcgtgagctcgttcatgggcgtgatgtccgagcgcttcggaatgggcttgcccatgaggaccctagccttggccttcttctcctcttttttctgctccggggcgggatattccgcctggatctgcacgccgcgcagccggaactgcgccgcgagcagctgctcgatattcgtgcgctcgaccggcgcgggcatacgcgcaaaccacgtgtgcagctgcatcgtcatgctctcgcgctcgatgagcacgtcgagcacctcggccttgtcgagtccgccgcagctatcctgcagggacacgcagtccgggaacatatcgagaaacgggatcttttcgctcatagcttcctcacttttcgctcaggatcaggtccaccagcgcatcggccagcttgtccgcggggtacttgccaaggatctcgccgcggcgaaacagcaggccgcagtccttgccgccggcgatgccgtagtccgcctcgtgcgcctctccgggaccgttgacgacgcagcccatcacggcgaccgtgatctcgcgctccagcccctgaagccgctgctcgacctcctgcgcgagcgcgatgaggtcgatctgcgtgcggccgcacgtcgggcacgagacgaagcgtacgccctcgcggcgcagcccggccgccttcaaaatggcgatgccggcgcgcacctcctccacggggtcggccgtgagcgagacgcggatcgtatcgccgatgccctcggacagcagcgtgccgatgccgacggcggagcggatgatgccgttgtaggccgtgccggtctccgtgacgccgacgtgcagcggatagggaaaccgctcggccgcgagccggtaggccgcgatcgtcagcggcacggtagagctcttcatcgacagggcgatgtcgtcaaaatcataccggtgcagcaggtcaatgtgcccctgcgcactctcgacgagcgcctccggcgtcgggtgaccgtacttttcgagcagacgcttttccagactgccgccgttgacgccaatgcggatggggatgccgcgctcccggcaggcctcggccaccttgcggacattgtccggctcgccgatgttgccggggttgatgcggatcttgtgcacgccggccttcgccgctgcgagcgcaaggcggtagtcaaagtggatgtcggccacgaccgggatgggcgaggcgtgcacgatctcgggcagggcatccgccgcggcctgatccggcacggcaaggcggatgatctcgcacccggcgtcatgcagccgggtgatctgctcgatggtcgcgcgcgcgtccgatgtgtgcgtgttgcacatggactgcaccgcgaccggggcgccgccgccgatggcaacggggccgacatggatctgttttgtctgggttcttttcataaacactcctgtatctccgagaagcctgaaaacgcacaaaagcccgaggcggaaagatccgccccggatcaggtgacaagtttggaaatgtcgttatacatgacgtaggccatcagtgccagcagcagcaccagccccgccgtgtggatatagccctcatatttggggtcgatctttctgcggctgatccgctcgagcatccacgtgacgagcaggcagaacacgcgcccgccgtcgagcgccggcagcggcagcatgttcatgaccgcaaggttcacggcgatgaacgccgagaaataggcgatgttcgagaaggcggccgccttcgtggccgactccttgccgacctcgttcatcatgctcacgatgccgaccgggccggacagatccttgacgccgactgcgcccgcgaacagatcgctcagccccatccagaccatgcgcacgaagtccatcgcgctgtaccacgtggtctggagcttggcgccgaacgtcgccggcttcgtgccgaagtagaagccgtacattttgccgtcctgccccggatactcgcgcgcgacgaggtaaaaatcgttgagcgcgaccttttcaccgtcacgcttgacgacgatgtcatgcgtgtcgccgccgcgggcgagatattcactgacattggtcgtaaaatagatgcggtgtccgtcgatgctccagatcgtatcgcccacctgcagggcgttctccccctgataggggcagccgtccatgaagtccgtgagcgtcggcgtggaaaagctcttcgcctgcgcgaacacgatcagaagcagtagcagaccgaacacaaagttcatgaacgcaccggcgcagaggatcagaaaccgcttccatgccggctggctcgtgaacgcgcgcgggtcgtcgatcgcctcgtcctcgcccgccatggcgcaaaacccgccgatcggcaggcagcggacggcgtagagcgtctcccccttctgctttttccagatggcggggcccatgccgatggcgaactcatccacacgcaccccgcacgccttggccacaaggaagtggccgagctcgtgcacggcgatgaggatcccaaagacgagaattgcgagcagaatatacatgcaggtgtcctttcagaaatggaaatatgaccggacgaacgcgcgggcctcctgatcggccgcgcggatgacgtccagatcgggcgctgcggccggcgtgatggcatccaccgccgccgccacgctctcataaatggaatgatacccaattttatggtccagaaacaggtgcacggcgacttcgttggccgcgttcatgaccgtcggcgcagtgccgccggtgcgcgcgcactgcatggcgagcgcaagacacggcagcgcctcgagatcgggcgcgtagaaatgcagcccgccgggataggccgtgaagtccagccggtcgctgcggctgggcttgcgctccggatacgtgagcgcatactggatgggcaggcccatatccggcacgccgagctgggcgatgaccgtcccgtcaagcagctcgaccatcgagtgcacgacgctctccgggtggatgagcacctggatatcgtccggcgtgacgccgaacaggtgcatggcctcgatgaattccaggcccttgttcatcatggtcgcggagtctacgctgatcttcgcgcccatgctccagttcgggtgacggacagccatctcgggcgtgacgtcgcgcgtttgttcgcgtgtccagccgcggaaggggccgccggagccggtgagcaggatcttgtgcagctcgccctcccggccggtcaggcactggaaaatggccgagtgctcggaatcgaccggcacgatctccgcaccgcattctctggcgcggcgcatgacgatgtcgcccgcgcacacgagcgtctccttattggccagcgcgatgcgccgtcccttttcaatggccgcgagcgtcggccgcagaccgaccgcgccggacaccgccgtgacgacggcgtccgtatcggagatgaccgccgcctcgcacagtgcgttttctccgccgccgacggcgatgtccgtatcggcgagcgcgatgcgcagcgccttggcagacgcctcatccgtcacggcgacgaacgccggatgcaggcggcgcgcctgctcctcggcgagctgaatgttgcggttcgtcgtcagcgcacggacgttcagccccagatgctccgcgacggcaacggtctgccggccaatactgccggtagaaccgagaatggaaatcgaatgtaccatagttatgctcctttactgcgccacgaccgcgatcgccggtgccagcagcaccagcagctcaagcatgggcgcggtgaagatggtgctgtcaaaccggtcgagcataccgccgtgaccgggcagcagattgctgtagtccttcacgccgtgctcgcgcttgatggcggaaaacgccaggtcgcccgtctgtccggcaaggctgccgaagaaaccgtagatggcgagcagaccgatctgcacgcggtagccgcacaggtgcagtacgaggccgtagagcatggccgccgcgatcgcgcacacaaagccgccgacgcagccctcgaccgtcttatgcgggctcagcgccggggcgagcttggtcttgcccaggctgcggccgacgaaaaacgcgcccgaatcgctcagccacgtgatgacgaacggcagcagcaggtacggcgctttggggtcgttcaggccaaggcgcacgagcgacgagagcatccacgggatgataatgcccgccgtgaacacgagcgccagatcctgaaacgggatgcgctcggacttgtgaaacgagagcatcatctcgacgaacatggtcacgaacagcacgtaggccgcgatcttgaacacgagctcagactttccgaacgccgcgccgagcacgatggccgcgccgcacacgccggcatacaccgcaaagcgcggcacgaacttcggcatggccgtgtgcagcagctcccaggcgcagaacgccgccatgatggccaccacgatgccccaaccccagatcggggtgaagaagatcacggccagcagcgccgggatgccgatggccgcaacgatcagtctgtttttcatgattggtccctcccgtttgtctttctctcgggtgcagcggtcatttcacgccgccaaagcgccggtcgcgccgctggaactccgccagggccgcgtccatgtcgcgctcggtaaagtccggccagagcacgtcggtgaaatacagctccgagtacgcgccctgccagggcaggaagttactcaggcgctgctctccgctcgtgcggatgatgaggtcggggtccggaatgccggccgaatacagatagccgctgaacacatcctccgtgagctccggcgcggtaccggccttgtaggcctcggcataccggcgcacggcgtgcaggatctcgtcgcggccgccgtagttgatgcacagattcatctggcagccgtcgtagtgcgtactcttttcctcggccgcggccatgaggcgctgcagctccggcgagaggccggaccgctcaccgaaaaagcgcatcttgaacttgtcgcgctccatgatcgaaagcgcttccttcatgtatttatcgaagatgctcataatcgtgcgcacttcctcgggcggacggcgccagttttccgtggaaaaggcgtagaccgtgaggtattcgatgccgatggccttgcagtagttgccgatgcggcgaaacgcctccgcaccgtaggcatggccggccgtgcgcggcaggccgcgctttttggcccagcggccgttgccgtcgaggatgatcgccacgtggcgcggcaggcgcgagaaatccacctgcggcgcggtcgtcttatcgtttgccatagttcctcctgcgccgcccggatcggcggcgtctgtagacaggatattcaaacggggggatgaaaaatccccccgtatcacatttgcgggtgcgggcgctcagatctccatgagctccttctctttttcgtcggcgatgcgctcgacttccttgatgtaatcatcggtcagcttctgtagatccttctcgatgatcttgaggtcgtcctcggtgatctcggactttttcttctgcgccttgaacttgtccatcgcgtcgcggcggatgttgcgcacggcgaccttggcctcttcgccgtacttcttgacctgcttgacgaggtcgcggcggcgctcctcggtcagcgcggggaagatcaggcggatggtgcggccgtcgttctggggattcaggcccagatccgacgccaggatggccttttcaatgcccttgagcacggatgcgtcccacggctggatgagcagcgagcgggcgtccggcgtgctgacggatgcgatctgctggatgggcgtgggagagccgtagtaatcgaccgtgatgcggtcgagtacggcggggttggccttgccggcgcggacggaatcatactgctcggtgaggaccgaagcggtctttttcattttggactcaaactcggtataatcggtagacatgatgtatcctccttatcgggttttcaaatttgattttatttggtcacgaccgtgccgacggactcgcccatcacggcacggacaatattctgcggatcagccagcgcgaagacgacgaccggaatgtcgttttccatggccagcgacgtcgccgtcagatccatgacggccagatgctttgccagcacctcgtcataggtgatggcgtcgtacttcacggcaccgggatcgacgtgcggatcggcgctgtagacgccgtcgatgttcttggcaagcaggatcgcgtccgcgccgatctcggcggcgcgcagcacggcggccgtgtcggtcgaaaaatacgggcagccgctgcccgcgccgaagagcacgaccttgccctcttccagatgcgccacggcgcgctcccaggtatagtgctcggcaaatgtcgacatttcgacggccgtctgcacacgcacggggatgcccttctgctccatgacgtcagacacggccagacagttcatgacggtggcgagcatgcccatgtggtcggcgcgcgagcgagccatcttgccctcgccgtttttcacgccgcgccagaagttgccgccgccgatgacgacgcctacctgcacgcccagttcggtgcaggacttgatgacatcgcacacctgcccgatgacgccgaaatccagccccgtcttctgctcgccggccagcgcttcgccgctgatcttgagcaggatgcgtttatatttgggtcctgtttccataaaactacccctcactttttcatattcgtcgttttattgtaatataaaaccgcccggatgaaaagggggtatttgtgaaaagagcgaaaacaatcgcccgccggcttcacacgtccacgagccgggagacgaattcgtccgtattcgtatcgaagagtgcgatggcgccctcggcgtccccctgcgtgacgaaatagagaaaatcctccagcacatcgcccgcggcgcgcggcccgaccgagcgcacccactgcgcccagaggacgatattcacatcatggaaaccgttgacgatgagcggcacgacgttgttgccgctcttaaagcagatataccggtggaacgaacaggccagctctgcgagcttgtccacgtccgcgcgcggctgctgcgcggcctgccggaaatcacggatgatcgtgcgcagcaccgcaatatcatcgtccgtgcgcttgggcacgaacagccgcaccgcgagcccctcaatgacattgcgcgtctgcagcagcgacgccgtcgtcgccatgtcgagcttgccgtcgcggtattttaatatggagatgagcgtgtccacgttgccgcactcggcccagtcggcaacatacaccccgtgccgcggcgacacgcgcagaaagcccatccgctccagattcttgatgccggcgtgcacggcgctcttgctgatgtgcatattctcggccagctccgcttccgtgggcagcttttcccccggctccacctggccggagaggatcatgccctggatctgccgctcgaacaactccgtgattgttggcgcaacgatggtctgaaaacgcatacgcagtcctccttgtatttgtgattgaatcagaatcacaagaaaatagtaccaaaaaagtgacgaaaaagcaagtcgattcttgacttgtagaattcttgacatatacttttcgcagtgattcaaacacagaaggaggaattgacttgcgtttttacaaagaccactatgatgtcgtcatcatcggcggcgcactggccggcatggcggccgccctgcagctgcaggccaagggcgtgcgggacattctgatcctcgaaaagcacaacatgcccggcggtgtcgccacggactacatgcgcgacggctttgagatggaggcctcgctgcatgagatgatgtccatcggcccgaaaggtaagcggctgaaggtcggccagttttttgacgacatgggcattgacatcgactggctgccggtgccggagccgtaccgcgtcgtcgtgcccggtgagggcatcgacaccgtgctgcacgacggctacgagcacatggcgcgcgacattgacgccgcctgccccggcacttacgacaaggtgctggaattcatccgcctctgccgccgcgtgtacgacagcatggacgtcatatccgtgacaccgatgagcaagctgcgcatgctgcgcgagcacccggactttgtgcgcgtggcgggctacagcgcctcggaagtcatccggacctttgacctgccgcagaaggcggtcgatatgctcacgccgtactggatctacgtcggcgagccgatggacaatctcccattcacgatctacgcctactgcatggcggactattttgccggcagctatgtgccgcgccaccgctcgcacgagatgagcatgcgcatgcagcagaaggtcgaggaaaacggcgcgcagttcgagctgcggcaagaagtcgaaaagatcctcgtcaaagacggcaaggtccgcggcgtgcgcacgaagcgcggagacgagatcgcctgcgactatgtcatctgcggcgcgtacccgaaccgcgtctacacgcagatgatcgagccactgagcgaagtgcccgccggcgccatccggttcgtcaacggcaaccgcctgaatgtctgccccgtgtcggtcatgctcattctcgagggcacgcccgaggaaaacggcatcacaaactacaacaccttctccggcgacacgatggacacgaacgccatctggcgcaacaactgcaacctgaccgaaccgtacaacttcctgacgaccgtgtgcctcaactatgccaaccctgactgcgtgccggccggctatacgcacctgtcgatcacgaatctggtgccggtcgacccgttccttggcgtcaaggaggaggaatactacgatctcaagcgctgcctggccaatgagatgatggagcagtacatcaagatcggcggcgtggacttccgcggccgcatcgccgagatcgaggtctccacgcccatgacgatctcccactacgtcggcgcgtggaagggcagcatctacggctactcacactccatggacaaccacgtggtcgccaagaagaccatgatggcggaagatcacttcatcgacgggctggagtttgccggcgcacacgccgtggccggcgacgggcagggcccgcagatcaccaacggcagagccgcggccaaggccgtgctcgacgcgatggcagcaaaggaggcagcgaaatgagtattcgagtcaagagctttctgaaagacgtcggcggcgcgggccgcgtcaccgaggcgcgccgcgaaaagctgaaaaacgcatccgccgtgccggatccgaaagaccccatccgggatctggccggcaagctacacccgagtgagatgcagctgcgcgtcacggacatccgcgatgcgtccccgacggcaaaaacgttccgcttcgaggccgcggacgggcacattccggtgttccagtgcggccagttcgtgaacttccgcctgaagatcggcgagagcctgctcacgcggccgtatacgatctcctccgcgccgtacgaagcgcgcggcgagcacccgtttttcgagatcaccgtgcgccgcaacgtgccgtacctcgtgccggactacttctttgaaaacgtccatgtcggcgatgtgctcacgggcgcgctgccgttcggcacgttctattgggagccgctgcgcgacacgaccgagctcgtcgcgctggccggcggcagcggcatcacgccgttttacgccatggccaaggagatcgcccacggcaagatgcacggctgcaggctgacgatcctctatggttcggtcaagtcggacgatatcgtgctcaaggatgagctggatcagatctgcgccgaatgtccggacgtcaaagtcgtgcatgtgctctccgacgaccccgactggccgggcgagcacggctttatcacgcgcgagatcatcgaaaaatacgccgcgcccaacagcacgttcctgttctgcggcccgctggccatgttccggttcgtgcgcaaggcgctcgaggacatgggcgtgccgcagcgccgcttccgccacgacgtggtgaataacccggccgatatctccaccctgccgggctacccgaagggtacggaggaaaaaacgtttcgcatcaccgtcgtgcgcggcattcacgaagatgtgatcgatgccagggcgagcgaatccgtcgccgtcgcgctcgagcgcagcgccatcccggtcgatacccactgccgcaacggcgagtgcggtttctgccgcagccagctgctcggcggcgacatcttcgtgtcccccatcggcgacggccgccgcgccatggacaaggaactcggctggttccacgcctgctcagcctacccgctgagcgatctgaagatcaaaattccgattatgtaaaccggtttcaaacattatgtaaatcaaattcacgcttccttccctgaaaaacccgcacacggctgcgccgtgtgcgggttcgttttctcggaagggaacggaaaagagcccggctaacgccgggctcttttccgctggaatgagaggatataaaaagaagacaaagcggacattacatccagccgccggagacattcatcacatgcgccgtgacgtacttcgactcgtcggaggcgagatacagcgccatgtaggcaatgtcgatgggctcgccgaggtgcttgatcatgcagttggtcgtgtagcgcgactgcgtctcgggcgtgagatgcttggcgacggcctccgtggcgatgatgccggggttgagcacgttgacgcgcacacccgcgtgcgcgacctgacgcgccatctggcggctgaggtggttgatgccggacttggcgacaccgtagccgacctgcgtgcgatcggggcacacggcagcgacggagccgatgttgatgatgctgccggagtgctgcttgatcatggccttgttgagcgcctgctggcaggcgttgaacacggtcgagagatccacgcagacggtcttttcaaactccttgtaggtgcacttggtgatgtcgaggtccttgcgggggttggattcgccgaagttgttgaccagcacgtcgaggcggccttccttggcgatgcactcgtcgatcatgcttctgtgcgtggcggggtcgtgtgcctcaaagtagacaagctcggcctgaccgccgcgggctctggcggcctcaacggcagccttaccggtctccatgttgcggcaggcatagtagaccttcgcgccctcatcgacgaacaggtctgcgatcgcgcggccgatgccgcgggtgcacgccgtgaccagcgcgacttttccttccaaacggttactcataacagtacactccctttcattttgtgtgcgcggttttgcagctttgcgccggtgtgcgcgcaccggcgcagcgtatcagaggtttgcgccgtaatcggcaacgagcgcctgaccgttgagcggcgcagaatcgtcgctgcacaaaaacagcaggatcttggcaatgtcgagatccgagcacgtgcccacgtcgagcgtggaatgctttgcggtggaggcctgcatggccttggcggccttcgtgtacttgcctctggccttcatggcgcgcgtggtcatgggggtcatgaccgtgccggggcacacgcagttggcgcggatcttctgctcgccgttggcaaagcgcagcgcgatgtgcttggtcagcgcgacctccgcgcccttcgagaccgtgtaggctgcgctgccgttgccgttcacgccgccgacggaggcgacggtcgcgatcgtgccgtagccctgcgcgatgaactgcttgacagccgcgcgggtaacgtacatcgtgcccttgacgttcacggtcagggtcgtgtcgagatcgctggtaagaaaatcgtcgatcggccgcatggcgacatcgagcacacctgcgatattggccagcgcgtcgatctttccgtacttttccacaccggccgcaaacgccgccttcacagcgtcattgtcggtgatgttgacgacagccgtcatgacctcgccgcccgcagcccggatgttggccgcgaccttgttgaggttttcttcatgcatatccgccatgatgacgcttgcgccctcgtgtgcgaagagctcggcagtcttggcgccaatgccggaaccggcaccggtgacgaaacagacttttccatcaagtctacccatttgtttctcctttgctgatatagaatgcggcggacgggctgtgtgagccgcagcccgtccggtatgttgggatcactcgtccttgagcggccactccatgccgatgcgctcacactggcgctcggtatcccagaagaagccccaatcgggcaggtgacggatgcgggcggtgtccgccggcgtccacgtcacgatctcgcccttcttgtagaggtcgtcgatctccttatcggtgtatccgaactcctgcagcacctcgcggttgtgctcgccgaagcacggcgcggatgccacgatctgcgaggggttgttcttgaagcggttcgtgataccgatgcccttcatctcgccgaagatctggtcttcccactcgacaaggttctcgcgctcggcgtactgcgggtcgttttcgatatcgcccggctcataggcacgctggttcggaatgccgaccttgttgaagatctcctcgagctcggcgcaggtgtgcttcgcgcagaaatccgtgagcgcctgatccgccttctgccccatgggggtgttgagcgggaagccggggatgcccttcggcagacccggcgtcacgcccggcgtgccgacgccgatgatgggatagcccttctcgaccgggccggggccattgatggcgacaaagagctgcttgttgtccttcgtggtgtagaatgagaagcaggccgcaaggtcggagtggttgccggttcggtacggcacgggctcgccgtctttcgggtagcccttgttgtaccagagcaccggatagttatccagcagacggaacatggtgtcgtactgcgcaacgtcgcaggactcgcccttgccagtcttgagcgcgtggatgtaagccgacagtgcggtcatgcaggcgttgtaggccgtgacatagtcagacagataggggttgaccttcagcggcacatccgtcggggacacgccgttcatgtacatataaccgcccatggcctgaccggaaacgtcgtaggatgccttggacttatacgggcccgtctggccgtagccggagacgtgcacgatgcacagcttgctgttgacaccccagcagacctcatcggtgaggcccatcttggcataggtgccggccttgctggactcgatccagatatcggcccactcgaggcactttttgaagatcttcttgccggcgggcgtgcgcgggttgcacgtgatagagtactcgttgcggtggttctgcgaccagctggtcgtcccgcgcgtgccgcaggagatcttgggcgcctcggactggagcaccttcgcacccatttccgccatcaggcagccggcaaaggggccggcgatggccgtgccggacacaaagaccttgacaccgttgagaacgccgaagtcggggtattcgctgaacttctgcgtgaggttgcagtcaatttttttgaaactcatgtatgctgtgcctcctttttgttgtgtttttctacagattcctccggattcaagataagctgccaacatgggcaaaagcccatgctgacagcttaccgtctatttgcgctaagatttactttttcgggggatactccaggccgatgcgcttggcctgacgctccggatcccagaagaagtgccactcaacgaagttcttgatgcgggcggtgtccgccggcgtccaagtcgcgagctcgcccttcttgtagagcgcgtcgatctcctcgtcggtgtagccaaagtccttgagaacctcgcggttgtgctcgccgaagcacggcgcggaagccacgatctgggacgggttcttcttgaagatgttcgtgacgccgatgcccttcatcttgccgaagcactggtcatcccactcgacgatgttctcgcgggcctcgtactgcggatccttctcgatgtcggccgggccgtaagcgcgctggcacgggatgccggccttgttgaagatctcctcgatctcgtcgcaggtgtgctcggcgcagaacttcgcgcacagctcgtccgccttcttgccgcgggggtcaaacagcgggaagccggtgcagttcttcgggatgccctcggtgacgccgggcttgcccatgccgatgatcgggtaaccgcgggtgacagggccctgaccgacgatcgcgacaaacatggcgttgccttccttcgtgtcgtagaacgagaagcaggcagcctggtcgctcttgttgccggtgcggaagggcacgggctcgccctgcttcgggtagcccttgttgaaccagttggccgggtagttgtcgagcaggcggaacatggtgtcgtactgcgcgacgtcgcaggaatcaccctcgccgctgttcttggcgttgatgtagccggcgagcgcgaccatgcaggcgttgtaagcggtgatgtagtcggacaggtacgggttgaccttcagcgggccggacgtcggggagacgccgttcatgtacatgtagccgcccatggcctgaccggagacgtcgtaggagggcttgttcttggccgggccgaactggccgtagccggacacgtgcacgatggcgagcttcttattgtgcttccagcagacttcgtcggtcaggccgcgcttggcataggagcccggacggccggcctcgatccagatgtcagcccactcgacgcacttgaggaagatcttcttgccggcggggctggcggagttgatggtgatggagtactcgttgcggtggttctggctccacgcgagggtgccgcgggtctggcaggcgatggtcggagcctcggcctgcaggaccttcgcgcccatctcggccatgaggcagccggcgaaggggccggcgatgttcgtgccggtcacgaagaccttgacgcccttgagaacgccgaaggaaggatactcgtcgaatttctgagtcagtttgttgtcgatttctttcatgttaggatgacaatcctttctgtgcgtatcgcactgaatgaggttgattggtcggaagaaattactctttggcagcttctgccttcttgtgcacgctcgggatcaggaagcagaccacgataccgacgatgacacagatgagctgcacgagcgccacggagtgcagcgcgctggcggcagctgcgggcactgccatgccggtggcggcctttttggtcatgcccgtgacgaacatgggcacgaagatggcaacaccgaacggagcagtcatatcacggaacacgttgtacgtgccggaagcggaggaggactcagccggagcaacaccggacagggcgaccttcatgaagatggtgccgttgccgccgatgccgagaccgacaaagaacagagcgccgcccatcatgaggatgccggcattctcgccgatgaagagcatgatcagagagccgatggcgacaaacacgagcgcgatggcagccacgaccttcggctccttcttgtcggccatggggccgaggacgacggtgccgatcgccatgccgaggtactcaatgctcatggcaaccgcagcgacggtggccttgtcgatggcataaccgaagcggatgatctcggtcaggcaggcggtcataaggccctgggtcaggagcatgaccagcacggggagcacaaagttcttacgagccatgaacttgccgttgaggatcgggttggaggccttcttctcaaccaggaagaggacgatgaggccaacgacggccacgccgatggacgcaagcgtcgcagcgctggcccagccgttctgctggccgaaggtgggcacgcagacgagcgcaccgaacatgagcaggacgaacacggcgcctgcccagtcaaagccctgcatggtgcctttggggatgttcgggttatccttgacctttgcaaagcagatcaggaacgtgatcacgcacagcgcgacgcagacccacatgacgatgcgccatgcattggccgttccgatgaccttcatgatgatgccgccgacggtgggtccaaagatgaccatgccgcaggcaactgccatgtagaccgtgaagccctggcccatcttctcgggcgggaactccatcatgatgtaggacatgacgaccggggcgatgccggcagcgccgataccgaccatgaagcggaacacgagcagcagcgggatgttctgcgggcagatggcgatgagagcctggccgaccgtgtaaaggcccatggcactcagcagcatctttctgcggccaatcacgccgccgagcttgcccaggatcggcgccatggcggcggcagccagggagtaagccagcgtgatgaaggtcagggacgagtcggcatcccaggccgtggagatcgcggtcggcaccgaagcggtgaagccgccgcaaaggctcaggatcgccgccgcaatagcgtagggcacaaagcctttcatataatttttgttgttttccatgagtacattctcctgtctagtgattccggcacgaagccgtgtgacagttggtttcttctgcgtgctcaatagcctttggcgaggctttcctcgacgagcttgctgcgcacgactttcccgttttcgttcacggggatgtgatccaccaattcaatggatttgggaatcttgtacggggggagataattgagtgcgaagcggatcaggtccttatttccgaccgggccgttcgtctccacgatggcgtggatacggtggccccaatcgggatccggcaggccgatgaccacggcgtcgaccaccttggggtgctttttgagcaccatctcgacctcggcggcaaagacattttctccgccggtgacgatcatgtcgctgcggcggtcggcaaagtacaggtagccttccgcgtccacatagcccatgtcgccgacgctgcggaagccctcgctgtccgtcggcagcggcgggatgttcttatatatcacgcgcgggctgttgtcgccccaggacatgaagatctcgccgatctcgccggtgggcagttcgtggccgtcctcatcgcggatggacacccggccgcagtgcatcttgccgacgctgccggggtggcgcagccactcgtcgccgcggatggacgtcatgccgatgcactcggtcatggcgtacatctcgtagagccgctcgggcgggatgatctgaagccactcgcgcttgagatcctgcgagcagacgccgccggtatggcaaagcacctcgaggctcgcaaggtcttccttccggaagccgggcatgcggctgatgcgctgcatgagcgtcggcaccatctggacatactcgatgcggtactttttgatgagccgcacgatcgtctcggcgtcgagcttggccggcatgatgagcgtgttgccgcagtagaggccgttgaaggccgccgagtgcggcgcgccgtgaaacagcgggcccgcgagcagctggcgcatctcaaagcgcatgccggacacggcgaaccaggtccgcagaccctcgtcgctctcccctgccggcatgtcctgctcgatgaccttcgtcttccccgtcgtgcctccggagcagttggcaagattggggatggcgagcacatcggggggcatgtccgcggggcagtcggcacacagtgttctgagttccgccgtgctcaggccgggatagccgtccggctttttgcggttcgtgatgacgagcgccggagacacacacgcgcagatctccatcagattgcgctgcggcgcgcggttggacaccggcacgtagcaggcgccggtcttccagatgccgaacgcgagcgcgatgtgcgtcgggatgttcggcagcgcggcgagcacgctcttacccgggccgacgccctgaccgagcaggtaccaggcaatgcggttcgagagctcgtggagctcccgccacgtcatgacggactccttgttttccggggaaacgtaaatgaccgccggcgcatccggcttcacggcggcgatgttcgccagctgtgtgccgggtgtgaagaagctctccgtcccggtattgaaaatgttaaaatgctgcgtgcgcatctccatcacttcctgacagcactgaattttgcatacgccgatcccgcccgccctcagcgggcgggatcagcggctttggaaaattacttcggcaggttgttcggacggtagccgccgtcgatctgcaggcagacgccggtgacgtaggacgcggcgctggaggacaggaacaggatgccgttggcaatgtcctcgggctcggcaaagcgcttcatcgggatggtatcaccgacggagtccttggcgaactgcggcatattggcgaccatgtcggtgttgacaacgcccggagcgaccgcgttgacacgcacgcccttgttggcgaaggaataagcgacggacttggtcatggcgatcagggcagccttgctggcggggtacggcaggccggtcgggcagccatagacaccggcgacggaagcggtattgacgatgcagcccttggtcttgaccaggtgcgggatcgcgtacttcatcatggtgtagggggccttcatgttcaggttgcagacggcatcccactcggactgcttgagcctggtcagccaggtgctgttgtcggtgccggcgttgttgacgagcacgtccagacggccccacttggcaatgatctctttgtacagttcctgaacggccttgtagtcgcacaggtcgatggccttggtcatgacttcgtagtcggggttgatctccttgagcgctgctagagccttggcaccggtctcttcatagtggctgaggaagtacactttggcacccgcagcgagaaagcccttgactgccgcgaagccgatgccgcgactaccaccggtaacaagaacgaccttacctttgaattcattttcaaacatgattctttgtcctttcttaacgcaaatctttgaccttttccggagctttcccgtcaccccggacacacaccagcagttatgcttttgttaaggaacgataatattttaacattagattcgattttcttccgggcgttgcctcctgttttgctatcgttaaaaacgacaaaaaataagatttcacaacagatttcgtggcaaaactggcaaagcctcaaaagacgaccgctgtcgcttttgaggctttgtccacattgacgatattttctgttaattctcactttcgaccgggtatctggtgaaaatattcccgcggcatcttctcggtcacgataccgagcagatccatcatatagcagaagcacagctggagctgatcgggcgactgccgctccgtctccgcgagaatgccgtccatggcatcattcgcgatctcggcatacagcccgtgcagcgccacgaccggcggctcggacgggacataaaactgctcgaacttcatataggggttcgccacgaggtagacatatgtgccgctgttcatgcggctctcggcgatctcaagcgtctcccccttgtccggctgatagcggtagcggtgaaacggcccgaggttgacgagggtgtccggcttgaggcggtaatccagaccgttgaccgtgagtgtaccgtggccgctgcgcacgagcaggaacgtctcgtcgtgattattgacatagagcgtcggcgccttgatcttgcgcacgcacgccttgatatcgctgggcaggacattgttgacaaaatagtcatgcgcgccggccagaacggacttctcgtccttggagctgaaaaatgccgtgccggatgaacgttcgttagccatgctgcttcctcccctgtcctctctgcttgcggaactcgcctggtgacatcttgttgagcgcatagaacacgcggcccatcgtgcggtcagagccgaagcccgtctccatggcgatgtcgactgtcggcagctccgtcgtcgtgagcagcgcctcggcatagcggacacggaacatcgacagaatctgcttgtagctggagttcaggcgcgtcttgagctgcacacgcaggatattctccgaggtgtagagatcgtgcgcgatcttttccgcgtcgatcggctcggacatattttcatacagataactgatggcagagataagcgtctcactcaggatcatgccgcggtagacccggccgtccttcccgtcgctgagcatatcgttgaggtacccttgcggggtcatgccggtcagcgccttgaagcggcggaaaaacgtgatgctcatatgaaagccggagatggacgacacatagtcaaacggcaggctgtcatacaggaagtacgacatggccaggatcaatcgcacgcggttgacatactggctgaaattcagccccgtggcaatcagcagcgcatggttgagtgccgtctcatccgcgtcggacgagaccgcctcggcgaccgaggccgccgtgagctccgccgtgctgtgcgtggcgatatagaggctggcgcgccggccgagcggcatatccagcagcgagtactgctccttgcggcgtgcggcggcgcggttatacagcagctcgatcttgcgcaggaaggagctgcggatcacagccgagccgcagctgtttttcgcgctcaggtggcgaaactgctcaaactgccgcgcgatctggcgaacatcgtccccttccggcccgatgaccggcaggccggtcacgatctcgacctctcgcaggttggtgatctgattgaacatataatagctcaaaagctgataatcaaacgcggcgacccagagcgtgagcgtctccccgaattcggggcagatcgtcagcacctgcgagcactggatccaggcaacgcagcccgcctgcacggggaattcctccccgttgatgataaagctgccgctgccgctgcggacaagcacaaaatagctgtccacctccataacggggaacagctcctcactaatggtgtgctcctgaagacggagatacttatccggcccgcaaaaatacccgctgcgcggtgtctcgcagagcggcctgttttttctcttcaacgtgcttagcccccattcgtggtaacaatacggcttgcaaaccggcaaccgacaatacttctgtttatagattaacagctttttgtgcaaaaaacaagtgaacgaattccaaacttttaaacattttccccgttgtgttacaaaaagcgaaaagtggcaaaaggcccgccggtgtgcatccggcgggccttcgcgctgtgataagattgaaaggagtaagaggatgaaaagaaaaatagcaaagagaattgacgctgacttacagctcgtagccgacgtggaagccctgatgcatggcatcgctggactggcccggcttgatggcgtcgccgatcacgtggacttccggcacgaacgccttgagctcttcggacagcggatcgtacttgcgggagccgaggccgaggacaatgtagtcaaagcccttgagccactcttccgtgccatccttgtgctggatcttgacctcgtgctcggtcacttcgagcaccttggagttgatgtagctcttaacgccctcgcggcgcaggctggcgagcgcaatgttgcggttcggcaggcagacgccggtcatgagctgcggctgcatctccacgagcgtgacttccacgtcgccgatgctgccggtggtggcaaaggagttcggacgcgcgtcggccatgagcatttcggccgtctcgcaggcgacttcgccgccgccgaggatgcagaccgtgcccttcgggatggtgaccttgcggctgaggatatcatgggtggtgatgatcggatagtcgccgacgcccttgatgaaggtcgggatgagcggcgtcgcgccggtggcgacgacgacggcatcgggcgcgaattccttcacgttctcgaccgtggcttccttcttgaactcgaacttcacgccggccttcttggcgcggtagttcaggtgcgtgagccacttgcacatctcctgcttgccgggagagacgaccgccagattcagctgaccgccgatctgcttgctcttctcccagacggtgacgtcgtggccgcgctcggccgccgtgacagcggtgtacatgccgccggggccggcgccaatgacgaggaccttcttcggcttgtcggtcgggttgaacggatagtcatactcgtggccgacgagcgggttgatgtggcacttgcagaccggatgatgcggatcttccggcgtgatgcaccggccgccgcaggagccgcagggcgtgatgtcatcgaagcggttctcgtaagctttcttcggcaggtcggggtctgcgagcaaaggacggcccatagacacgccgtccaccagaccacgctccaccagatcggcggcgtagcgcacgtcgttgatcttgccgacaacgaaaaccgggatgttcacgaccttcttgatctccgacgcctcgtagacgttcatgccgatcttctggctgtgggaaggaaggatgttctgaaggccctcatattggacgccgccggagacttcgagcatgtcaacgcccgcagcctcgaacttcggggcgaggtaaagcatttcatccagggagttgccgcccggctcacgctcggaaccggagacacgcagcacgatcgggaaatcgcggctgatgttgcggcggcactcttcaatgatctccaggatcaggcgcgcgcggttgtcgatgcagccgccgtactcgtccatgcgcttattgcgcagcgggctgaggaatgcgcccggcagcatataggcgtgcgcgacgtgcagggcaatgccgccgcagccggcctcttcggcgcggcgcgcggcctggccgtactgcttgacgaccttgtggatctcgtcaatggtgatcgggcggctgacagcgccgttggcgttcgtgttcacggacgggccgagcggcgtgatgcccttgagcgcacagatggactccgggccggggtgaatgagctgcgggaagagcgtgctgccggcatcgctcacgcgcttggcaaaggcagcaaactgcgggacgagggagtccttgtccagcgcggtcgtcttgccgatgtaccaatacttgtgatcgaccgtgactgcgtcgatgacgacgtagccggcgccgccctctgcgcggcgcacaaagatatccgcgagctgcttgggcaccgtgccgttggtcgcctcatagtgcatgctcatcggcgccatggcgatacggtttttcagcgtcgttctgcccagctgcaggggcgagaagattttcgcatctttcatatcggttatcatgtgattgcctcctgaacgattattaaatgtgtatcccacgtagcggccgcccgccggacatgccggccggagggcgcgcatgggtgctccggatgattcgtgctttcagtataaaggaaacggcgcggccatgtcgcacattttcttgttaaataatccacattttcaaaaagaatttcagaaaatgatggcgcgcaggcagacactttttttgttttcactacattttgcacccattttgtcgaaattgtccgtcgataacatgccgaaaaagcgccgcgatcccccggcgttctctgtggaaagaagcgaaactgcacaagaaatcgcagccgattttgtatattacgccacacttcgtctgccatgtgacaataaaactgaagtttttgtacatttcccgcgcatgattacgccacattctttccgacacgttttgcggcctagtgttaaaatttctacaatagctgatgcagagcggaatccggccaccagcggccggtctccgccggatcattcccgggtccgtcggacatgattaaggaactccgctctcaggcagacgtgtaggaaatcagattcggattcattccaatgaagaaaggtgtatttcatgagttacgatgcattgttttctcccatcaagctcagagggcttgagctgaaaaaccgtgtggtcctgccgggtatgaacaccaagatggtcaaggacaagaacgacgtgggcgaggatctgcccgcctaccatgcggcgcgcgcagccggcggctgcggcctgaacattgtcgagctcgtctccatctgccccgagtgccatgcatacctgtacctcggtctttataatgagcaccacagagaccagctgcgcaagatcaccgacgcgatccacgcggccggcggcaaagcaggcgtgcagatctggcacggcggcttcgtgcccgaagagttcttcgacaagaccaacaagcttgagacgcctgacacactgaccgtcgagcgcatccacgagatcgtcaagcagttcggctactccgccaagctcgccgtcgaggccggctttgacgcgctcgagttccacggcgcgcacacttacctgccgcacgaattcatgaacccctcgctcaacaagcgcaccgatgaatacggcaaccagagcctggagaaccgctgccgcttcaatctcgaggtcatccgcgagatgcgcaagaacatgccggaagacatgccgctgctcatgcgtctggacgccatcgacgagatgctcccggccgtgaccacgcaggacgagaccgtgcagttcatcaactgggccgccgaggccggtgtcgatgcgatcgacctgtcccgcggcaacgcccgcagccttgcgaccgtgtatgaagtgccgccctacaacctggagcccggcttcaacatggacaacatcgccgccatcaaggcgcgcgtgaatatcccggtcatcggcgtcggccgcattgtcgaccccgcgctggccgatcagctcatccgcgagggcaagatcgacatggtcgccgtcggccgtgcccagcttgccgatcccgaatggtgcaacaagtccatggaaggccgcgaggcggagatccgccgctgcatcggctgcaccgagggctgctacgacaaggtcatcgacccgaaggccaagcacatcacctgcacccgcaacccgggcctctgcctggagtacaagggcctcccgaagccggagacggccaagaacgtcatggtcatcggcgccggcatcggcggcctgatggcagccgagtacctcaaggcccgcggccacaatccgaccgtttatgaagcggccgagaccgccggcggtcacttcgtcctggccggtaaggccccgaagaagcaggccttcaccgacgctgtgatgtgggacgtcgaagagtgcaagcgcatgggcattgagatcaagaccggcgtgaccgtcacgcccgagctcatcaaggaagtcaagcccgaccacgtgatcgtcgccaccggcgcgcactatgtcgccccgaacattccgggtctcgacaccgcgaaggacgtctatgtggctgaggacgtgctggccggcaaggccatgccgaagggcgaaaccatcatcctcggcggcggcggcgttggctgcgagaccgcgcagttcctcatcgagcacggcgttaccgatgtgcgcgtgatggattccaagcgcgtcggcaacaagatgggtatgctgcgcaccatgttcctcgacatcgagtaccccggcgataccatcaagaagagccgcaactccaaggtcaccaacatcggcgaccacgagatcacctacgcgttcacgaacaaggccaagaagaccgttgagaagacccgccactttgattccctcgtcatcgccaccggcatgcactcccgcccgacgcaggagctgaccgatgcgtgcagcgagctcggcatcccctgcgacgtgatcggcagcgccaagaaggccgacatgggcatcgaagccaccgccgacgcttacgccgccgccatgaaggtctgatcgcaaacgtcaaacacagataacaagtcaggaggttatcattatgacagttgaagaacgtctcgaagcactcgagaaagaagtgcagcgtctcaaggacgtgcaggccattaaggagctcaagagcaagtatttccgcgcgctcgacaccaagaactgggacgagctggagacgaccatgaccccgaacatctccacggcttactccaacggcaagctcgttttccacggcccgaaggagatcaccaactacttcaaggagtccatgccccacaccgagatcaccctgcatcagggtcacaacccggtcatctggtttgaaagcgacacggtcgcctacggcaagtggtatctgcaggacaacctgatcttcgccgagggcaacccctactgcggcacgcagattcagggctctgccatctacaccgacaagtatgtcaaggtcgacggtgagtggctgatcgaggacaccggctacctgcgcgtgtatgaggaatccttccagcgcgacaacacgcaccgcatccgcatcaacatgttccgcccgaagaaaaagaaagtcatcaagaaaaagtaaagaaacccgctttattcaagccgtcgtacattcgatgtatggcggcttgaaccaaaatgagtgaaaaaatccctgcgaacggagcgtgatccccgtgctgaaaaaactgcggcgcaaagtctaccgaaagatccgttttcagacctggtaccgcaaggcatactactaccaccgcaagcggcgggatctggacaagaccatcgcccagtaccgcggcgtggatgtactgagcgacaaaaagcgcctgtaccgtctgcggcgcgacatgatccggagcctgttccggtacggctcgtactacaatgaatatttcctcttcggctacgaggggaaggacgccgcctaccgcgacagcttcatcaccgagggcgtgcgcatgagctactacccgcgcatgaacgacccgaagaacacgaacctgctcgagaacaagtacctgacgtaccagaaattccgcgacttttacggccgcgatgtgctgcgcatcaaaaaaggcgcgcagcccacgcccgccgcgctcgaggcactgcgcgatttcacgcaggcgcacccggattatatcgtcaagcccatttacgccgccttcggcaagggcgtacataccgagtccatccgcgactacccctatctcgaggctgcgcacgccgcctacagtgcgcacggcgccatcctcgagcagatcatcgagcagggcgaggcgctctcccgcatccacccgcagtcggtcaacacgctgcgcatcccgacagtcgtcctggccgacggtgaggtgcggctgtttcaccccacgctgcgcgtcggacgcggcgacggcatcatcgacaatttcagcgccggcggcatcagcgcactcatcgaccccgagaccgggtgcatctgctccgacggcgcggacaaaaagggccgccgctacgcggcccatccggacaccggcgtgcgctttaacggctaccgcctcccggaatgggacaaagccgttgccatggtcacaacggcggcgcacatggtgcccggaaatcactattgcggctgggaccttgcctacagcacacacggctggtgcatggtcgaggccaactgcaccgcgcagatgggcggcatgcagatcatcacacaaaccggcagaaaggcagaactggaagcgctcatcgcgcagatgtgacgccactgctgtaaataagcaaaggaagccaacaaggacaacatcgaaaggagaaaaaaccatgactgaacttgaaaaactcgtagaaaaagacgcaatccgtgaccagtattacgtttacgcccgcgcactggaccgcatcgacaacccgctcggcaagaccgtgttcgccgaggacgcgcaggtcgactacggcccgacctacaagggcaccggctacggcttcatcgacatgatgctcaagatgcaccgcaagatggtctccacgcaccacgtcatgaccaacatcctcatcaagctcaacgaggacggcaccaaggccgccgccgaggcttacatgtacgccgcctgcaagtatcgcaacggcatggtcgtcgtggcacgctgccgtgacatcgacctctgggagaagcgcgacggcaagtggctcgttgtcaagcgcaccgtcgccggcgacaacaccatgatcctgcaccccgatttcgcgcctgactacaacaatggccgcgacaaggtcaaggatccgtcctacgactacttcgagaccatcgagtaatcccgccatggcgacgagaaacatcccattcccggacaaagtccgcgacatggtgctcgatgtcatcaagcacgtccgccgtcaggaatacacgcctgagcagctgtgccagctccagaagatcatcgaatgcaagtacttctactggtggtgcatggacatgaaaaaagaagagtatgtgatggagctgtttacggacgacttccgctactacctcaatggccatctcgccgtcaaggacaagctcctgcaggcgcgcaacgccaaatggtgcaacaaggacatgcagacgatgcacatgggccatcagccaatgatctggctgatcgacgacacgcacgcacgcggggtattccaatacgaggaccatatgtgctattatgatgacagcgaggtcctgcagggctggctggtctactgcgacgattttgtcaagggcagcgatggtgcgtggcgcatccagaagctgcgcatggcctatcgcgagatggacggcagcttccgcagcaccatggtacccaaggactgggtgccggatgaatgggacacaccaaactactaagcaaacgaggaagccgcacattcgtgcggcttccctgccgcctcattttctcaaaagcatccccggtgaatgcctttgaaaagctgaggaagctccaaatctgacgcaggagaatgcaacatggaacaaaaacggacactgggcagctggatctccgcacgcagatacatccgcgacttcgccgcggattacgctgcccggcacggcgagaacgccgccgagatcgaaaaggacatcctgcaggccaagaagcgcaaccacatctcgctcaacgaatatgagtgggtcggctatcacgaccgcacggaggcgcaaaagcgcaccatgtccacgctctggacgcgcgcggagttccgcaagaacttcaccgaccgccgctacattgcgatcctgatgaacaaatacatcttctccaaggtcttttccgacttttacggccgccgctgcgtgcaggcgtccgccgtggacgcggcgctgctgcgcgcgctcgccggtgacgccgggaaggtcgtctacaagcccaactgcaagggtcagggcacgggcgtgcgcatcctcccggcagcgaccgaggccgaacaggcagacgcactcgcgtatctgcgcgcaaattccggcggcatcgtggaagaatacatccagcagcatccgacgctcgcgcagctcaaccccggcgccgtgagcatcgtgcgcttttacaccgtgaccgcgccgtccgggacgtatctgtttgccccggtgctcacgaccgccatcgaaaaggacatctccaacggctgccaggacgcactgaccgcgatgatcgacatccgcaccggtgtcgttctcacggacgccgtggatcagaacaatttcatcgactatcatacgcacccggtcacgggcgtgcccttccccggcctgcagctcccgttctgggccgagaccattgacatgatgcgccgcgccgtgccgctggccagcaagatctccaacatcggctgggacgtgaccatgaccgcggacggcccgctcatcatcgaggccaacaccattccgggcttcaacaccgcgcagtaccgcggctatgcctgggtcacggacggctatggctatcagccgctgttcgacgagctcaacggccgcccgttcgtcaataacgaccactatgcgcgcgtgctcttgaagctcgactaacatctcacggaggttccggtatggaagctgttctctcagtcgctttcggtgtctggatcgtcatcaccgcatttgtctaccgggccgtgacgggcccgaaacgcggggacgggcggaaaaaatgaatctgtatttcctgggaattctcgctgcgctcgtcgtgttcttcgccgtcggcatcgccgcggggcgcatggtcaaggatacgaacgactactacgtctccggccgcaacgcgccaacgctgctgatcgtcgggtcgctcatcgcgtcgtttctttcaacgggcgcgtttctcggcgacacgggcgaggtctactccggctttttcatcggcatcgtgaccgtcggcgtcattcaggcgacgggctatatctacggtgccggcttcttcggccggtacatccgccggagcgaggtgacgacgctgccggagtatttcggccgccgcttctgctcgaagcatctgcgccgactctcggccgtgattttgctcgtgtccgtgagcgcatatctgctcagcgccattcagggcgtggccacgctcatgagcagcatcacgggctatgactaccgcctgtgcgccgtgatcgtgtggctggcgttcaccgccttcacgatctattccggctcgccgggcgtgctgctgacggacacgatcatgtttctcgtctttctcgcggccgcgctcgtcgccgtcccgtttctcatccgtgcgggcggcggctggttcgccggcatcgaggcgctcgccaacagcgacaccatgcccggcatcctctcctgggccggaaacccggactacctctatcctgacggcgtgagcaacaccgcctgggcggtgacctacggcatcgtctgggcgctcgttgtggccatcagtccatggcagacgagccgctacctcatggcaaaggacgagcacgtcgtcctgcgctcatccgtgtggtcgtccatgggcgtcatggtcgtgacgatcgcgctgtacttttccgccgcgttcgtgcgcaacatcaacggcagccttccgggcagcgaggccatgatctgggccgccacacacgtgctgccgccggtcatcggcatgctgctgctcatcggcatcagcgccgccggcatctcgtcggcgtcgacgtttttgtcgctgatcgggttttccgtcgtcaacgacattctgcccgaggccgaaagcgaccgcaaaaagctcgcccgctcccgctgggcgatgctggcggtcagtcttgtcgtgctcgcgctcgcctacctcaatccaccgcagatcttcctcatcatgtatttcggcggcaccgtcatcgcgggcgcgtggagtctcgtggctttcggcagcgtgtggagtcgccgcctgagccgctgcggcgcgtatctcgggatgctgctcggctttctcggctgtgtgggcgcgaaggcgatctacgccctgcgcggcatcacgccgccggtctgggcggatgcgtttttcatcggcatcgtgctgagtatcctcggcgcggtgatcggctctgcgctccggccgccgacgcaggcagaacagctcgcgcgcgaacggctcttcgatgcgcccaccggcccggaggaggccgccgcctgccgaaaggaccggcggctgtggcgggtgtacctcgtatttggcctgtgtgtgggcctgtttttcctgtttttctatgccattccctacagccgcgcgctgtgatcttccccggaggtgaccgccatgtcggacacgctgaatctgtactatgcccgcatcgccaacatgggcgatctgctcaacccgctcatcatcgagcgctgcttcggctaccgggtcgagcgctgctcgtttctcaccggcgacctgtgcgccatcggcagcggtctggcacagtataagctgcacggcaatccgctcatgaagctgcagcagtgcatcaacggccggacgcacccgcacgtggacgtctggggctccggattcatcaactacgacgatgcgcgcggacgctttttcaagcgcgacatgcgctttcacgccgtgcgcggcgagctgacgcgccgcagcgtcgagcgcatgaccggccgcacgctcgacattccgaccggcgacggtggcattctcgcagacgagctgctggacacgctgcccgaaaaacggtatgatatcggcatcgtgccgcacgtctgcgacctgaatgaccccaccgtgacggatctgctgggccggtacgaaaacgcgaagttcatcaacgtcaaggatgaccccatcgccgtgctgaccgagatcgcgcagtgccgctgcatcctctcgagcagtctgcacgggctgatcgcggccgacagcttccacatcccgaatctgcacatcgtcttttccgaccgcccgctcggcgacgggtataagttcgatgattactattccgcctatggcgtgcagcattcgccgcgcgacctgcgcgtgagcgcagcgcccgccatcgccgagatccgggacggctggcgcatccggccggagcaggtcgaggagaaaaagcgccagatgcgcgcggctttcccctacccggccgtgaatggaggcagcctatgaatgatctgatctcggtcgtcatcccgacctataaccgcagggacaagctgccggcgtgcattgcaagcgtgctggcgcagacctaccggaacatcgaggtcatcgtcgtggacgacgcctcgaccgacggcacggagcgcctgttcgaccgcagcaccgacccgcgcgtgcactacgtgcgctacggcgacaaccgcggcgcgtgctatgcccgcaatctcggcgcgcaacaggcacgcggcagcatcctcgcctttcaggacagcgacgatctctggcacccggacaagctgcaaaagcagtatgatctgctcacggccaccggggccgatctgtgctactgcggcatgaaccgcgtcgccgcaaacggcagctcgttttattatcccgtgcacgcgccgcaccccggccgcgcgctggaggattttctggccgagaaccgcgccagcacccagaccatgctcatgcaccgcgccgtgtgggagaccgtgcgcttcgacgagaccatccgccgctatcaggactgggactttgccatccgggcggccgagcgcttccgactcgtgtacctgccggaggcactggtggagtccgaggtcggcggcgacagcatctccgccgtcgtcaaatcctacccccacctgctgcggctgtatgaaaagcacgcagcgctctaccaacgctttccgcgcagcgacgccgtgatgaaccgccgtctcggcaagcgcagccacccgaccgatccggcgcgcgccgccgcgcacttccgcaaaagtttccggctcagccacaatccctatgacctgagctattacctcgccaactgcctacgcgcccgccggcagcagaaaggacagacaccatgaccgcattcgtcattttgcattaccgcgccatcgacacgacccgcagctgcgtcaagagcatccgcgcgctcgcgggcgacaagcacatcgtcatcgtggacaacgcctccccgaacggcacgggcgctgttctggcggaggaattcgccgcgagcccggacgtgaccgtgctgctgcacggcaagaacgacggctttgcccgcggcaacaacgtcggcacgcgctgggtgtacgagcatctggacgcggacttcaccgtcgtgctcaacaacgacgtcgagatcccgcagcacgacttcattccccagatcgcgcgcatttacgcgcagcacccgttcgacctgctcgggccggacattgtgtcggtgttctccggcattcaccagagcccgaaaacgctgcacggctgcacgctcgagagcgtgcggcacaagcgtgcgtgcgttgcgcgcagcaaaaatcccatcctcctgctgctgagcagcggcgagaaaaacagccccgccatctggcggctcgtgcagatccgcaaccggaaaaaacagcacattgacaccacgcgccccgcggagggcgtcgtgctgcacggctcgtgcgtgatcttctcgcagcgctatcttgcccgccaccccgagccgttttacccgaaaacgttcatgtactacgagatggagatcctcgactggatctgccgccaggagggcagcgtcgtgcgctacgacccgtcgatctccgtgctgcactatcagtacgtggcctcgaagatggagtaccgctcgatcgtgcggcgctcaaaattcgtcatcgactgcctgctcgactcgctcgatgcggccgaggagctgatccttgcatccgagacggcagagcccgcggcagcgcagccggtaaacaccgtcgcgctcgcggacgcctgagcgcgcagaaaggcggcaccgcgccatgaaaaagaaaaagacccgccgcgcgacccgggcgttttacgccgggctgtcctacctctcgccgcggtggaacaccaaactgttatacctgcgcaagttcggccgtctgccggatctgaagcacccgcagacgctcaacgaaaagctgctcaagcaaaagctcgagcgcttcggcacggaccccgtcgtgcgccagtgcgcggacaaataccgcgtgcgcgactatgtggacggctgcggctgcggcggcacgctcaaccgcctgctcgccgtgtacgaccggccggaggacatcgactgggacgcgctgccagagcgcttcgccgtcaagtggaacttcggctgcggctacaacctcatctgcacggacaaaagcgcgctcgacacgaacgccgccgaaaagcagctgcgcgcctgggggcgcgagccgttctgggcgtattactccgagctccagtaccgccatgtcgagaaaaagctgctcgtggaggagtacatcggcagcgcggacggcacgctgccggaggactataaattttactgcttccacggccgggcggattgtgttatgctctgcgtggggcgcgacgagggctggccgaggttttatttcttcgaccgggacttccggctcctgcgcatcaaccgtgactcgcaggccgcacccgaggacttcacgctgccgaagccggcagggctggacgaagcctttgccattgccgaccggctgagcaagccgtttgacttcgtgcgcgtggatctgtatctcacgccgcgcggcgtgcgcttcggtgagctgacattcaccccggcggccgcgctggacaacaagcgcctgccggagaccgacctgcgctttggccgcaggatggaggaaacactatgaacattgccattctcggcgcgggcaacagcggctgcgcacttgcggccgactacgccgcgcgcggccatgaggtcacgctcatcaagacctcgcacagcctgcacgacgacaatttctcgcacctgtgcgcgaccggcggccggatgcgcatccacgaattcggcacggacacggactgcgtgatcgcgcacctgtcgcgcgacgtggcggatgtgcgcggcaaggacatcgtgctgctgtgcacgcagacgggctaccacccggacgtgctgcggcgcgtcgtgccgtttctgacgccggggcagatcctgctgatgatcccgggctacctctccaccgcctatgcgctcgggctgcacccggccgacggcgtcatcttcgccgaggcggagagcaacttcatcgacgggcgcatcggcgcgccgggcgagtttcaggtgggctttcgcaacgtgcgcaaccccatcggcgtctacccgcacaacgcgctcccggcggcacgggaagtgctcgaccggctgggcacgccgtttgtgtatctcaggagcgtggccgaggccgcgctgcacaacccgaacatgatcgtgcacacggtcggcgccgtgatgagcatcccgcgcatcgaggccacgcacggcgacttctgcatgtaccacgaggcgttcacgccgtcgacctggaacctgctcgaggcgctcgacggcgagaaaatgcgcgtgctcgagcaccttggctgcgaccccgtgccgtatgtcgaggcgtgtaaattccgcaacagtctcgacgatgcgcgtgacgcgaaggaggtctttttcgcctacgccgccatgccggagcgggcaaaagggccgctgaccgtgcgctcgcgctacatcatggaggatgtgccgcaggggctcggcctgctggagtcgctgggtgcggcgctgggtgtgccgacgccggtgtgctcgtcgctgatcgagatcgcctcggcggcgctcggctgtgacctgcgcgcgcagggccgcacgatcgagcggctcggccgggacaacatccgggccattctggacgatgcagagaggggcgctgaaccatgtcccgctggaacgcactgaaaaagacttaccgcatgtgcacgcgcctacgcgcgcagcgcggcggcagccggacgggctatctgctcgacgcgctgtggtgcagtgtgcggcacggcgcatcgccggaaaactactttgtgctccgcttctttgccctgccggactggcagcgtgcggccttcctcacatccggccgctccggtgcgctcgaccgggcgctcaaccgcaatgccgcggcggcggaaaaggaagcccttgcaagcaaggcgcgctttctcacggtgttcgcgcccgatgtccggcgggcacacgtctacgcgccggaagcggactttgccgctttctgcacctttctggatgaaaacgacacgttctttctcaagcccgtcggcggcacgatgggccgcggcatcgagcgccgccgcagcgccgccatccccgaccgtgccgcattttacaacgactgccgggcgcagcggctgctgctcgaggcgcccatccggcagcaccccgcgctcgaggcactcagccccgggtgcgtcaacagtgtgcgcgtcaacgccgcgcgcggccgcggcggccgcgtccggctcatcggcgcgtgcctcaagtgcggcggccaaggcgccgcgaccgacaacttccacaccggcggcatcgcctacccgctggagctggcgtccggccgcgtgtccggcccgggccgcaacaacaccgatctcggcgactatacccgccacccggcatcgggcgcgtatctgcccggatttcaggtcccgttctggcccgcgctcaccgcgtgcgtataccgggccatggaccgcgtgcccggcatgggctacgtcggctgggacatcgccgtcacgcccgacgggccggagctcattgagggcaactggcactggccgggcggcaacatcattcaattcgacggagtgggcaaatatccgctgctccgggactgtgcaggtgaaaccgatgaagaacatcctcactgaaaataaactggtcaaaaatctccgcgcctaccccgtgctgcacaagcgctggtgcgactacgtcaaaggcgtctgtgaactgccggagggcttcacggccgaacagctctttcacgactacctcaaggtgcggcgcagcaacccggaaaagcgcgtgtccatgtccgagtacatgatcttcggcttctacggcctgacgaccgcgcagcaaaagcagtacctcaccgacgtggaggcgacgttgctcatgcgcccgtacaacagcgccgccgagccgtatctcaagagtaaggtaacattcctgaaaaatttcacgcagtttgtcagccgcggctggctgtacctgccggagagcgatcttgcagcctttgacgcctttgtgcgccggtaccacagcatcgcgctcaagccgcagtattccagctggggcatcggtttccgcaagctgacggaggctgagtggaacgcagcacccgaccggcaggcgctgtttgacgagctgtgcgcgggcaagtatctggccgaggaattcatccagtcggatgcctctctcgcgcgctttcacccggagtcgctcaacacgctgcgcgtgatcacgttccgccgcggcgagcgctttgaggtcttcggcgcggggctgcgcgtcggcaacaacggcctgcacgttgacaacgcccacggcggcggcatcttctgcgagatcgacccgaccaccggcgtcatcataaccgacggcctcgacgagcacggcaacagctacattctgcacccgatgaccggcgtgcgctttcgcggcacgcccatcccgcagtgggaggagatctgcgatttctgccgcagcgccgcgcagacgctgccgtgcctgcgtgtcgtcggctgggacgtggccattctgcccggcggcaagctggagctcatcgagggcaaccacaaccccggcatgaacatcgtgcaggcaccggccaagcacggcgtgcacgacaagtttgcgcacatgctgctcgacttttacggtgacccggcgcagtacgcctacgagacggtgaagcagccatgagcaatttcaccttttcgcccacggatattcccggcgtgcagatcgtcgacgtaaagagcttcgacgatgcgcgcggctatttcatggaaacctacagggcggccgactttgccgctgccggcatcacggatgcgttcgtgcaggataaccagtcctgctcgcaccgcggcgtgctgcgcgggctgcactttcaaaagcggcaccagcaggcaaagctcgtgcgcgcgatctcgggccagatctttgacgtcgccgtggatctgcgccgcggcagcgcgacctacggccgctgggtcggcgtcgtgctcagtgcggaaaaccgccgccagctctacatcccgcgcggctttgcccacggatttcaggtgctgagcgagcaggcggtctttgcctacaagtgcggcgacgtgtaccaccctgaggacgagggcggtctgcgctacgacgatgcggacatcggcatcgtctggccgggacaggacacgcccatcctcagcgaaaaggatcaaaactggccggcgctgcgtgcgctcggcatcgagctgtgatgtagcaagcgctgcggaggtgagatcatgaacatactcgtcaccggtgcaaacggcctgctcgggagctccgttatgacggagctgcgccggcgcggtcatcacggcatcgccgtcgggcgcgcgccgcagtgccgcagcacagacgcggcggcgtatgtgcaggcagacctctgcgatgcatcggctgtgcaggcgctctttgtcggcgtgcagccggacgcggtcatccactgcgccgcatggacggacgtggacggtgcggagctgccggaaaaccgcgagcaggtgtttgccgtcaaccgggacagcacgcaaaacgtggccgaggccagccgtgaccacggctgcaagctgctgtatgtgacgacggactatgtctttgacgggacgtatcccgccccctaccccgcggactacgaccgctttgccccgctgaatgtctacgggcagagcaagctcgacggtgagcgtgccgtgtgcggcacgctcgcgcagcacttcatcgtgcgcacctcgtggctctacggcgcgggcggcaaaaacttcgtgcgcaccatgctgcagctgagccgcacgcacgatacgctgcgcgtcgtatgcgatcaggtcggcacgccgacctatgtccccgatctcgcgcggctgctcgccgacatggtcgagaccgaccgatacggccgctacaacgcggtcaacagcggcggctacgtgagctggtatgacttcgcctgcgagatcttccgcaccgccggcatccccatgaccgtgctgccggtgacgaccgaggaatatggccgcagccttgccgtgcggccgcacaacagtcggctggacacggccaagctggcagccgccggtttccggccgctgcctgactggcaggacgcgctcgcgcgctacctcgccgcagaacaaccataaacgaccggggcgtcccgcaccaatgtgcgcggacgccccggttttctgttattcagcgcttgggcctgatgagcgacacgaacgactggatgcccgtatcctgcgagccgcgcggatagaccagcagcgtgcgcgccttcgccttgaagccctgcaccgggcgaaacaccacaccgtcgatcccccagcaggcgacgctcgccggcatgatgctgaaggcgatgccggtgttgatgatgagggcgatgctgtaaaaatcgtcggcatacatgcgcttattctcccgcaggcccatgttggcatacatgcccgcgatcagcccggccgagggctgactgtcctgcgcgcggttgagcacgatcggcatgcccttgagctctcttgggtggatctcttttttcgccgccagcgggtgcgaagcgctgatcatgaccatgcacggatccgagagcgtgacgcggctgtcgagccccttgccgagctccacgccgaagccggagagcaccgccatatccagctgcccctcggccagaccgctgagcaggctctggttgctgccgagctggaactcgatctccgcctccgggtgctggcggtgatatttgcggatctgcgagacgatggtccacagctcataggccccggcgtagccgatgcgcagatccgtcgcgttgccgagcgcaaccttcttgccctgcgccgcggcgccgttgtagcggatcatgagctgccggcactgccggtagaacacctcgcccgccggcgtcaagctcacgccgcgcttgccgcgcacaaacagcgcgtagccgagctcctgctcgagcagcttgatctgctggctgacggccgtctgcgagatacactgctcctcggcggcacgggtgaaattgaggtgctctgcagccgataagaacaccggaaggcgctgaatgctcacagtttccacactccttgtcgaataagcaacgctcagcagcaaaatattgctttcttttattatatccataactttttcttctgacaaggtcataaaacgatattggactgcgctctataaaaatgatacaattttaacaagacgagcatcaagtcacacccgttcaagggtcatcaaacattccgtttcataaggaggacaaataccatggaaaagatgcgttttgaaggcaaggtcgtcatcgtgaccggcgcgagctcgggcattggccgctcgaccgcgcggctgttcgccatggagggcgccaaggtcgtcgccgcggcgcgccgcctgaaacggctggaagacctgcgcgataaggtcgcggcggaaaacgcccccggcgtcatcctgccggtcaagacggacgtgcgcgacccggcacagattgaggccatgttcgacacctgcctcaaggagttcggccatctggacatcctcgtcaacaacgccggcgtgctcgacggtcagctccccatccatgagacgacaccggaggtctacgacatgatctacgagaccaaccagcgcgccgtgttcctgtgctgccagcgcgccatcaggatcttcctcgagcagggcacgccggcgaacatcgtcaacgtcgcctcggcagcgtccctgcgcggtctgaagggcggcgcgatgtacgtcacaaccaagcacgccgtgctcggcctgacgcgcaacatctccgcctcgtttttcgagcgcggcatccgctgcaactgcatcgagcccgcgaacatcctcaccgagatcaacaaggtgccgcgcgaaaagggcatcggcatcctcgaatggcagatgcgcgccggcaaggctgctccgctgcacaccatcacgaagcccggcgagaagaagcccatcctcggcaagccgaaagactgcgccaacgccatcgcttacctggccgacgacgttgccgctcgctacatctccggtgcggagctgaaggtcgacgccggctggctcaacatgtaaccgcccacatctgctgagaaaggaaacgctactatgtcgacgcattataaagattactacggcacccatatgccgttcggtcagttcccgaagttcggcgttctctcgagcgtgaaagtgctcatgacgggcacgaacatcgccggccccttcgccgcgagcatcatggccgagatgggcgcgcaggtcgtgcaggtcgagtccccgaacatgccctgccagacccgcggcaactacggctactcgcaggatcaccgcaacacgtactccatcacgctcaacacccgcaccgccaagggcaaagaggtgctcgagaagctgatcgcgtgggcggacatctggatcgagtccggccgtcccggcacgtatgccaaaaacggcctgagcgacgagcatatgtggaagatcaaccgcaagctcgccatcgtccacgtctccggctacggccagaccggcccggacaagaacaaggcggcctacgacgtctccggccaggccatgggcggctacatgtacatgaacggcacgagccccacgtctcccccgctgaaggtcaacccgtacctgtccgactatgccaccgcctacaacgcctgcatctgcgcgctgtccatcatgaccaacgcgcgcatcaccggcgagggcgacgcatgcgacgtgtcgcagtatgagacaatgttccgcctgctgggcagctacccggccgagtggttcaacaagggctaccccggcccgggcgagccggtcaagtaccgcaccggaaacgtcagcgacatcgcggcaggcttctcgttctacgactgcaaggacggaggcacgatcttcatcggcatggtcggcgccggcaacacgaaaaagggctacccgctcgtcggtctgcccacgccgggcgacggcacggaccccgacttccccgagggcatgacgggctcgctgaagtccctgccgcgcggccagcgcatcgaggcggccatcacgaagttctgcgccgagcgcaccgtcgatgaggtcgaggccatcatgaacaaggccggcatcccgaaccagaaggccttcggccccgcggacatcgaaaagagcgcgcagtacgccgcccgccacgacatcgccacctggaccgacagcgtctacggcgagatgaagggcatcggcatcacgaacaaattcaagaagaaccccgcgcagatcgtcgcctccgcgccgacgttcggcgagcacagccgcgaggtgctggagttcctcggctacacggaagcgcagatcgacgacatgtacgccaagggcgtgaccgcgaccatggatccacgcgagacagccatccagtggcacctcaaggactggcagttcttctggagagacgaccaggccgaaaagctggatctgtaaaagcatcctataaccatataaccataaatcaaaacggaggttccaaatatggctagttacaatcccggaacctacgagggcaccggccgcggctacggcggtaagctcatcgtcagcgtgacggtatcggaaaaccggatcgaatccgtaaaagtgacgcagcacaaggaataccgcggcattgcctggggcctgaacacgacgccgatagagcgctaccccaagctgatcgtggagtaccagacgctgaacatccccacggtcgacggcgcagatctgacgtgcgccgccatcctcgacgcgacggcggcagcactcaaggctgccggtgcgtccaaggagaacattgccgcgctcaaggctgctcccgccccgaaggcgccggagtaccaggatgaagtgcgcacggtcgacgtggtcgtgtgcggcgcgggcgcaggcggtctggccgcagccattgaggcgaagctggccggcgcggaagtcgtcatcgtcgaaaagcagggcatcaccggcggcgccaccgcgagaagcggcggcaagctcctcggcgccggcacgaagtggcagaaaaagcagggcctgtacgacaacacggacatggtctacgactacctcatggacgtcggcaaccgcaacggcaagttcatggacgagtcgaaaaaccgctatctggtcgatcacctcaaccagacgctcgactggctcacctccatcgaggcgaccgtgaagggcgaccccgcggaagtgctcgcagagccgtggcagccgctgtccaagcccgtggaaaaggacggcgtgctcaagacgcactttgacgtgctcgatgtcgaacccatccacgtcagcctgcagccgtggcgcgtgcacaactcccccggcggcggcggacagaccaacggcgaaggcggcgagatctccacgcccctgacgctgtactatgaaaacgacctcggcggcgagatcatctacgacaccgccatgaacgagatcctcacggacgaggcgggtgtcgtcaccggcgtgacgtgcacgcgcaagggcggcgccaagctcacgctctacgcaagaaagggcgtcatccttgcgaccggcggctatgcccgcaacaaggaaatggtcgcgcgctaccccgtcgcacattacttcagcaacgtgccgcatggcaacgtcggcgacggtctgacggccgccgagaagatcggcgcgctcaactacgagcatcccgccgtgcaggtcgtgtacacgagcctaacctgcggcatcggcatcaacgacgagtccggcctcatcgtcaacgaccgcggcgagcgcgtcgtcaacgagtggagctatcagtacacggtcagcgacgccatcgcccgctccggcagcaactgcggctggtacatcaccagcggcaaagagccctacggcggcgtgcagtacggttacaagtccgctgtcgccggcaagtccaaagatccctgcgccacctccatcgagggcctggccaagaagatgggctgcgacccggcaacgctgcaggcgacctatgaccgctactgcgagctggtcgaaaagggtgtcgacgaagacttcggcaagccggccgagttcctgcacccgatcaaggggcccaagttcgtggccctgcgcatgcacccgtgcgtaaccgtcacgttcggcggcctcgagacggacgtctccgcgcgcgtcatgaagcccgacggctccgtgatcccgcacctgtacgccgcgggcgaagttgccggcaccggcatgtacggcacgcagtacccgacctgcggcacgtcgatcggcagcgccctgttctatggacgcatcgccggccgcgccgtcaccgatcaggctttgctgtaatcccccccttacagcatctcagatacgcaagcgcctcagagtcaaactctgaggcgcttgtcattatgcacgatatgaaaaaggaagcatccggttcggatgcttcctttgtggtacgcccgagcggattcgaaccgctggcctacagagtcggagtctgtcactctatccagctgagctacgggcgcatattcagcaggagatattatagcaaagtccggacaaaatgtaaagcaggattttctgttcccatttgacggtggatatgctatactggtcgcaagaaacctgtatcggaaggacacaccctctatgaaccataaacgcctgcatacccgcctgctcgcactgctgctgtgctgtgcgctcgtgctgccgctgagcgcctgcggcgaggacaaaagcaccacgcagcagatctttgccatggacaccgtcatggacctgaccgcctacggcaagaaggccgacgacggcatcaacgccgccatcagcatcatcaacagcatggacacgctgctcgacccggaaaacgagcgcagcaagacctatgagatcaaccacgccatgggcggctccgtcgtcgtcaacgagcagatcgccaagatgctgcgcacggcgcagacggtatacgagcgctcggacggcgcgctcgacctgacgacctaccccctgagcaagctctggggcttcatcgaccagaactaccgcgtgccgtcggacgcggagatcgagcgtctgctcccgtgcgtggacatgagcaaggtacagctctcgagcacggacgacagcgcaaactcgctcgtgaccatgccggcggacatgtcgctgagcttcggcgcggtggccaagggctgtgcgtcggactatgccattcaggccatgcgcgccgccggcgtcacgagcggcgtggtgtccctcggcggcaacgtgcagacgctcggcaaaaagccggacggcagcgactggaacatcgccgtgcaggatccgaacgacaccggcagctatctcggctacctcaccgtgggcgagacggccgtcatcacctccggcagctaccagcgctttttcaccgagggcgggcagaaataccaccacatcctctcccccaagaccgggctgccggtgaacaacggcctgctgtctgtgacgatcgtgtgcgaggacggcaccatggccgactgcctgtcgaccgcgatgttcgtgctcgggccgcaggcagcgctcaactactggcgcacctacggcgggtttgagatggtgctcgtcaagtccgacggccatgtcatcctcaccaacggcctgtacggaaaattcacgcccaacggcgacaactatgtcgtccagtatgaaagctgatggataggaaactgcaagatcgggaatttttccggcgcgacgtactctgcgtcgcgccggacctggttgggcgcattctggtgcgccggctgccggacggcacgctgctgcgtgcgcgcatcacggagacggaagcctaccgcggcgcgcaggacacggcctgtcatgcctgtcacgggcgcacaaagcgcacggaggtgctctatcacgacggcggcacgatctacgtctacctctgctacggcatgcactggatgctcaacatcgtgaccgggcacgtggacgagccgcaggccgtgctcatccgcgcgtgcgcagacggcgcgaacggccccggcaagctgaccaggcgactgcagatcgacaaggcgttcaacgacggcgatatcacaacctgcccggaactctggatcgaggacgacgggcggcacttcgcgctcgagaccgatacgcgcgtcggcatcggctatgccgcgcccgaggatcaggcgcggctctggcgctggaaatgcggcgcacaggaggattgcacatgacctacacaccggacaccccactcgaggcgctggccggcatcgggccgaaaaaagcgcaggcatttcaaaagctcggcgtggcgacgctgcgcgatctggcgggattatacccccgccggtacgaggaccggacgcagtttcgcacgatcgcggacgcacagcccggcgaggccgtgtgcatccgcgccgcggtcgcggccgagccgcgcgcgcagtatgtccgcagcgggctcacgctcgtcaaggtgcgcatcgcggacgacaccggcgcgctggacgtgacctacttcaaccagccctaccgcaaaaacaatctgcacgcgggcgaaacgtacattttctacggcaaggtggaagccaacggctttcgcaagacgatgacgaaccccgtctgcgagcaggcggcgcgctgcggcagcgtgaccaactgcttttacccggtctacccgctgacgaccggcgtgacgcaaaacgacatccgcaaggccatgacgcccgcgctgcacgcctgcatcgggcagctgcaggacgtgatcccggcggacattgcgcgcacctatcacctcgcacagcaggactatgccctgcagaacatccaccagccggccgatgcgcaggcgctcgacacagcgcgcaagcggctggtgttcgaggagctgttcgtgctctcgaccgccatggcgcgcatccgctcgcagcggcgcgccgagggcggcatccgtatgaaagccgccgacctcgagacattttaccgcacgctccccttctcgcccaccggggcgcagcagcgcgccgtcgccgccgccgtgcaggatatgatctccggcgtgccgatgagccgcctcgtgcagggcgacgtcggctcgggcaagacgctcgtcgccgcggcgtgcatctggtttgcgcacgaaaacgactgccagagcgccttcatggcgccgacggagatcctcaccgagcagcatgaacacacgctgcgtacactgctcgagccgttcggcatccgcgtcggccggctgacgggcgcaatgaccgcgcggcagaagcgtgaagtaaaagaggcgctcgccggcggcctgctcgacgtcgtcgtcggcacacacgcgctcatcagcgactcggtgacgtttttccgtctcggtctcgtcatcacggacgagcagcaccgcttcggcgtcgagcagcgcgccgcgcttgtgcgcaagggcgagcagccgcacacgctcgtcatgagcgcgacgcccatcccgcgcacactggcactgctggtgtacggcgatctggacgtgtcgatcatcgacgagctgccgcccggccgccagccggtgcagaccgtgtgcgtggacgagcgctaccgcgcgcggctcaacgccttcatcgacaagctcatcggcgaggggcggcaggtgttcgtcgtctgcccgaaggtggaggagacagacgacgttccgtccgatctcaagtccgccgaagagcacgcgcaggtgctgcagcggacgtttccgcagcaccgcgtggcctgcatccacggccgcatgaaggccaaagacaaggacgcctgcatggccgccttcgccgccggagagacggacattctcgtctcgacgacggtcattgaggtcggcgtggacgtgccgaacgcggcgctcatgatcatcgaaaacgccgagcgcttcggcctctcgcagctgcaccagctgcgcgggcgcatcgggcgtgggccgtttcagtcatactgcgtgctcgtgtcggacgcgcacacggacgaagcgcgcgcgcgcctgaaggtgctgtgcgacacggccgacggctttcagatcgcggaggccgacctgcgccagcgcggcccgggcgacttcttcggcaaccggcagcacggtctgccggcgctgcacattgccgacctcggcacgaacatgaccgccgtcaacgacgcgcgcgacgcggcccgcacggtgctcgccgccgacccgacgctctccgcgcccgagcacgcggcgctgcgcgcccagtgcgcacggctcttcgccgccaacgacgggcattttaactgacatccaacggaggcatcccatgaccatcgcacaaattctcagcaaaatgattgccgcatccaatggcaatatccacgacattgaccacctcctgcgcgtctgggcctacgcccgcacgatcggcgaattggaggggctggacgcggagacgcagtatcttctggaggtcgccgccatcacgcacgacattgcctgcccgctctgccgcgagaaatacggcaacaccaacggaaaatatcaggagcaggaaggcgctgtgctggtgcgcagctttctggccgacaccggcatgacggaggcgcagatcgcgcgcgtggcctaccttgtgggccatcaccacacgctgcggaacattcacggcccggactaccagatcctcatcgaagccgactacatcgcaaacgcatccgaaaacggatacagcaagcagagcgtcatgcacttcatggacacggtcatgaaaaccgcgagcggcaaatgcctcgccgcctctgttctgggcatttccgcaagtaacctcggctgcgccggccgctgacggcgagcacgctacgaaacacacaggaggcaacggtatgaaaatcctgcttttgagctgcagcaccggcgaggggcacaaccactgcgcgctcgccgtcaaggaggcgctcgacgcgcgcggacacgagacatccttcctcgatatgctgcacatgttcggcgcccccgggccgctgagctttgacaaaatcctcaaccgcatctcgaccaaggcgccggacgtgttcggcatgatgtaccacgcgggtgcgatgtacagcgcgaccggcgtcacctcgccggtctacatggccaacatccgccacgcacggcagctcaacgcctacatccgcgacaacggttacgacgccgttgtctgctcgcacctgttcccgatggaaacgctcacgttcctgcgccggtgggagcgctgcgaggtgaaatgctgcggcatcctctcggattatacgtgcatcccgtttctcgccgagaccgacctcgacgcttactttctgccgcacagcgaggtgcgggagctgtgcattcaggccgggatgccggccgaaaagctcatcgtgtccggcatgccggtggcggcgcgctttctcgcgccgatggacaaggccgccgcgcgcgccgcgctgggactgccggcagacaaaaagatctacctcatcatgaccggcggcatcggctgcggcgacgccgtgtcgctgtgcgacgcgatccgccgcgtgccggatgaaaacgcgctgctgtgcgtgctacccggccggaacgaggcgctgcggcaggcgctcgaggacgcttatcatgggcagggcgtgctgaccgtgccgttcacggatcaggtgccggcctatatgcacgcggccgacgtgctgctgagcaaggccggcggcatctccagctccgaggccgccatgctgggcgtgccgctcgtgcacacgatggccatccccggtgtggagacggaaaacgccgcgttcttcgcgcgccacggcctgtcgtttttcgcgcgcagcgtggacgaggcggcgcgctttgccgacaggctcatctatgacccggcatgtgccgaacgtatgctggccgcgcaggccgcctggctgccgcgcaacggcgcagagcagattgccgctgccgtcacggcacaatgaaaagcgaaaacagcgccctgtgcgggaaaacgttcctgtacagggcgctgattctttagatatcgcttccgtccagctcgagcgtctcggccagccgcgcggcaaaagcttccggctgcccggcgacaaactccgcgtgcgcgcagtccggaaacgcgacgaacgccgtctccggcagcaggcggcgcacatggcggatgttcagtgcacgctggaaatattccttgctcccataccagtacgacacacgcgccgccgtttgcaggcgcttcggcagcggatagtggaaacaggagtcaaacacgcgccagacatcgcgccggtccatccgccccaagatcatgcagacatcctccaccgccgcctgaccgaagcgctgcgccggaaacgcccggcggatcagcgccaggtgccgctgcgcaaaccggatgacgagatagttgcgcagggaaaagccccgcgtcagccaccgcggcgcgcggtacggcgtgatggccgcgtcgagcacacacgtgcgcaccgccaccttcccgtctgccagcagccgcagcgcgaccgcaccgcccatggacacgccgtacagcccccagagcgcgctgatgccccgctgctccagccagtcgcccagttcggccgcgatggcctccacgctcgtgtagggcgtcttttcgtccgggtcatgcgccggcagcgccggtatgatgagatggtactgcgtctgcagccgctctgccgccggctggaacatccgccagctcaggcaggcgctgtgcagcagcaggacagtcttttcgtgttcggttccgaattcatgtatgcgcatggacgtccctcccggatttgcattctgaattatgataggcagatatgcgccgcgttgtcaagcgcgggcagcaaaaaaatcgtccgcccggaaggggaatccggcggacgattctttgttggggacagcggtcacgcacaggcaaagtgcgtggtgtcacaccgctgcagggaatgggggaagagaagagaggtgaggtgatttggcttgatgcgtctgttgttggtatcggtaaccggagagattccgggtacgatcggaagaaattaaccgacgagcgccttgccgagcgcctggcaggccgcgagggccgcgtcatcgggcgcttcgttgcagatcacgctgtcgcacgcgagctggataccggagctgcggcagtcgcgctcccagttgtgcatccactcgccgccgccccagccgtaagagccgaacagggcgacacgtttgcctttcaggctggacttgcagccgtcgaacatcggctcgaactccatgtcctccagaacttcagagcccatggccgggcagccgagcgccacggcgtcatatccgccgacggcggaaccatccacatcggaggcggtcagaagcaccgcgtccgcgccggcacttttcatgccctcgagcacggcgttggccatggcctcggtgttgccggtgccgctccaatagatgactgctgcttttttcatgatggtaacatcctttcattttgtgctgtatttcgctgctgcacgttcacggcgagctgcgcaatgctcgagccagcgtgcagacgttggcaataaatctccgtgcaccgctggtattttgcaaagaggtcgcgcgcccgctgctcgtcgccgtacaccttccagaggccggcgtacttgaaatcagccgcgtggtgctcgatgaatcctttgacgtcttccggcggatagctcagaaacaggccgatctcgtgggggaattcgtcgtacgcgcgcagccgctcgatgagcttcatcaggcactgctcgctgctgccgcagacatagcctgcgtgccgcaggatctctgctgccaactggtcctgcagatcccgctccagatcgcgtgggcggtacagatacagcagcgcgctcttgtccgtgaatcgcagcgggaggaggcagagtcctttgggaaccagcacctggttatactggcggatctccatgagcaaagtctcccggttttcatacggacaggggaacaggctgccggtcttgatcccggccagtgtcggcgcgcagagccgtacgacgttttcctccgacatggcttgcctccttatctgtggttgtttaccggttttcgcgcagtgagcaatgctgcgcgattgatagttaaagttgcctaactcatgtgtgaaaagctgcgcgtttcgttgctttctgatgctatgatactgcatgatacacccggcatccgctccaaatcatcggaacatggctccaaaatgaaaaatgtcgtccgccccaccgtcagaccgccggcgcctccggcgcgcagctgtcgcagtcgatgccgctgcggtaggcgttgggcgagacgccgatgacatcccggaacgctttggcgaacttgctgccgttatcatacccaaactggccggcaatatccagcaccgtgcggtcggtctgccgcaggagccgggcagcgccatgcattttctgcgcgcgcagaaacgccgccggcgacatgccgtacacgccgcgaaagctgctgttgatgagcgtggccgaggcgccgaagcgctgcgagagctccgcgaccgtcagccgccgctccgtgttctcgagcagatatgcgccgatctgctcggcgagctgcacctgcgactgggggtaactgtgctgcggctgggccgcctgcacggggaacgcgctcaaaaacagcagcagctccaggatcttgactttgaaatagcccttgcggatggcctccggcacggagtagagctcggcaaaaatgtgcgccacgccctgtgacgagcgcgtgacaaagcaggctgagtccgcgcagaatttttcgatgagtgcgctcggccgcacctcaacatcctcgagaaagcacgacaggcagtccggtgcgcgtgccgggtcgatcgacaccgtgatgccgtggtagtgcccggttgggaagcgcgccggggccgctgccgccgagcgctgcacgatcgccagatcgcccggcgaaaggaaaaagcacgcgtcgccatacgggtaggcgatgcgcccctcgcggcagtggtggatctccagacagccgggcgcgcgtgtgcgctgcatggcgcaggccgtggcgtgcacgtcgtgatacacgatctcaatgcccgggaaaaccgggtagaccgtctgcaccacttccccatcggcgccgccgagacgatagaccgtgtgctcggcatcctgatgcagcaccgtcgccagtgtgtccgcgaaagtttcgttttgttttgctgtggccattgcgccgcacctcccgtttttagttagatgtatctaatttagtaggaaaataaaagcgccgttccaaacggctctatgtatactttattataccgtgcccctgccgccgcgtcaagcggcagagtacaaaaatgccctgcggccaaagaccacagggcgtttctggagctagtgatgtgactcgaacacacgacctgctgattacgaatcagctgctctaccgactgagctacactagcacatttcttacagcttgcacattctatcacatgtctcaatggatgtcaacaaaaaagttcgacgattactatttgttttcatgcatgaaaaaatgtcgcatttctgcacaagttgtcgatttttttcgcttcctgtcagttgtgcagaatttgcactgttacacccccccgaaaaacacgcgctgtttcaggctttcccgcccgcggagaagatcaaagttcttacatttccgtgacaatatgtttacataactttttgccgacttcctgtttgctgtgagttatcaacattttcaaccgacttttcaacaccggattttcttttctatttcaagtgtttgctccgattctgcataaataaggaaacggtggaaacggactttgtggatttcgcaaaaaccgattttgttaccataacacaaatctctcgcagccgcgagagatttgaaaaaaagcttgacaggcaaaatgcaagatttgtgccgctggtgatgattcagagcaggccgctgtcggcaaacgacacataatcctcgccgcagacgatgatatgatccgcgagcgtgattcctacgagcaaaagtgcgtcccggatgcggcgcgtcgtgagctcatcctcgcgcgacggcagcgcataagcgtccacatggttgtggctgaggatgacggacaccgccttctgcgacagggccgtctcgacgatggcgcgcacggacacttctgcggcattgaccacgccgcggccgacctccttacagctgatgaggccgcacttggcgtccagacacaggaggtagacgacctccgtacgctcatacaggtacagcggcacgagatagttcccggcgtcctcgctcgagcgcaggatcgtctgctggcggcgcttggccatctggtaccggcgaccgacctgcgggatgagcgtgaggagcgtggccacgttctcccccacgccgggcacgcgcatcatgtcctcgcagcttgcctcaaagaccgcgtcgagcgtgccgaaatgatccagcagcgcgtgcgcgagctcgttgacatcgcgccgcggcacggcgtaaaacagcagcagctcgagcacgctgtggtcatcgaaattatcgagcccattgcgcacgaagcgcgccttcatacgggcgcggtggccgtcatgcacgcccataaaacggcacctcggagatctccatattggcccaggcgttgagttcgctgccggcgcgcgcgccgcgcagatactcataatacgcctggcagccgatcatggcggcattgtcgccgcagagcttcagcggcgggacgaacaggcggatgccggccgcgtcacacgcggcctgaaaatctccgcggatgcgggaattggccgcgacgccgcccgccacggcgagcttgtcatagccgagctcgcggaccgccgccatcgtgcgcggcacgaggctctcgctcatggcgcggcagaacgacgcggcgagcgagggcttatcgagcggctcgcccttctgctccgccgtgtgggcaaggttgatgacggccgttttcagaccgctgaagctcatgtcatacgggcagccgtccacgtggccgatggggagcttgtacttccggtcgtcgccggtcttggacaggtcgtcgatgggcttgccgccggggtatggcaggccgagcacacgcgcggtcttgtcaaaacactcgccggccgcatcgtcgcgcgtggcgccgaggatgcgcaggtcggtatagtcgcgcacgtcgcagatgagcgtgttgccgcccgaaatagccaggcacacgaacggcggcttcagctccgggtaggcgatgtagttggccgcgatgtggccgcgcacatggtgcaccgggatgagcggcacgccgagcgcgagcgcggcggacttggcaaagttcacgccgacgagcagcgcgccgatgagccccggcgcgcaggtgacggccacggcgtcgatgtcaccgcgggtcagaccggtcactgccagcgcgcggtcggccagctgggagatgacctccacgtgcgagcgcgaggcgatctcgggcacgacgccgccgtaaatggcgtgcaggtcagcctgggaaaagacctgatcggtcagcacctcgcgcccgtcgcgcacaacggcgacggccgtctcgtcacaggaggattcaatcgcaagaataatcatatcgtctctgcctctctccggaaccaggtcatgaggagcgcatcctcgtccggcttctgatagtaatttcggcgctgaccgacggtctgaaacccgtgcttgcggtacagcgcgatggcgggcgcattggatgcgcgcacctccagcgtcaggaatgcgagatcgagcgccgccgcccgcgcgcacagcgcgtcgagcagcgcgtccgcgatgccctgccgccggtgctccggcgcaacggcgacattgccgatgtcgccctcatcgagcacgtgcagaaagtttgcgtagccgagcaccgtctcccccgcagccgcgatgagaaacacgtgccggtcgtccggcagctggccggccagctgcgcgcgcgtccaaggcgcggaaaagcacgcgcgctcgagcgcggcgagctgcggcaggtgcgccgccgcggcgtcgcagatcgtgtagtccatcagtgcgcctccgcccagctcgcgccgatctttgcgtccacgagcagcggcacgcggtaatcgaccacgtgctccatctcctcgatgaggatggcgcggaccgtttcggcctccgccgccggacactcgacgatgagctcgtcgtgcacctgcagcaggagctttgcctccagtccttcggcgcgcatacgcgcgtccacacgcaccatggcagccttgatgatatccgccgccgtgccctgaatgggcatattgagcgccacgcgctcgccaaagctgcggaggttgaaattcgacgatctcagctccggcaggtcgcgccggcggccgaaaagcgtcgtgacgtaaccgtcggccttcgcctgctcgacaatgcgcttcatatagtcgcgcacgccgtggtacttggcaaaatagctgtccatatacgccttggcctcgctctggaacacgccgatatcctgcgcgaggctgaaggccgaaatgccgtagacaatgccaaaattgacggccttggcgtgtgagcgctgcagcggcgtaacctcgtcgagcggcacgccgaacacctgcgacgccgtgacggcgtggatgtcctccccgctgcggaaggccgcgatcatggtctcatcatcggcaatatgcgccagcaggcgcagctcgatctgactgtagtccgcgtcgacgagcaccttgccgggcgaggccacgaacatgttgcggatctgcgcgccgagctcgcggcgcacggggatgttctgcaggttcggctcggtggacgacaggcgtcctgtcgccgtgacggtcatctggaagttcgtgtggatgcgcccgtcggccgagatctccttgagcagcccgtcggcataggtggacttgagcttcgtgagcatgcggtagtcgaggatctggtcaatgatcgggtgcttgccgcgcagcttttcgagcacggcggcattcgtgctccagccggtcttggtctttttcccggccgggagcatgagctggtcaaacagcacgtggccgagctgcttcggcgactggatattgaacggctcgcccgcgcaggcccaaatgctctgctgcagttgctcgatggcgctcgtgaggctctcgccgaaatcatacagcgccttgcggtccacgagaaagcccgtgtgctccatgcgcgccagcaccgggcacagcggcagctcgatgtccgtatagagcggcagcatgccgagcgcgtccatcttttccagcagcaccggctgcagcgcccagacggtctgcgcatccggcgcttccccgccgagatacgcctgcgcgagacgcgggagatcatagttcccggccgtggcgtcgagcagataggccgccagcgccgtgtcaaacacgaacccgtccgtcggcaggccctcggcgagcagcgcgcgcatgaggtctttgatgttgtggcccgctttatgcacgcggtcagaaaacagcagacgcagaaatgcattgtaatcatcgccgagctgcgcccacgcgagcgcatagcacgccttgccgtcgcagagcgtgagcgcgtcgagcccttctggcgcgagcaccgcgacatacggtgccgccgtgaccgcctgctcgagcgtgtgcagcgcggcgctgtccgtcacgtcgacggtcggcaggggcggcagcgcattttccggcgcggccgcgccgtcagccggctgcagcccccacttttccgagagcttcaaaaagcccagccgccggaaccagtcatagagctcggggcggtagtcccgatcccagacggcggattcgggcgcgaaatcaatgggcgcgtccgtgcggatggtggcgaggtcgaacgacagctgcgcgctctcgcgcccttccgtgagctttttgcgcacgccgggcttgatgtccagcgtgtcgagatcgcggtaaatatccgccaccgtgccgaagcgcacgagcagatccttcgccgtcttttcgccgatgccgggcacgccgggaatgttgtccgagctgtcgcccatgagcgtcttgaggtcgatcatgtggatggggtcgaagccgtactcggcgcggaagacttcgggcgtgtattcgatcgtctccgtctggcccatgcgggtcttgacatggcagacatgggtggtatccgtgatgagctggaggctgtccttgtcgccggtgacgatctcgcacgcccagccggcggcctcgcagcgtttggcgaccgtgccgagcaggtcgtccgcctcccacccggccagctccagccgccggatgcccatgtggtcgagcgtctgcttgagcagcggcatctgcacgacgagctcctccggcatgggcttgcgctgggccttatagggcgcgtactgctcgtgacggaacgtcggcgcgtgcacgtcgaacgccacgcacaccgcctgcggctgctcgagctcgagaatgcgctggaaaatggtcagaaagccgtagaccgcgttcgtcggcgtgccgtcgggcgcgttgagcatgcggatgccgtaaaaggcgcggttgacgatgctgttgccgtcgagaatcatgagtttcatttgggtgtcctccttgcacgtcactggccgcgcagctcaatgagccggtcgcgcagcacggcggcgtactcgtattcgagcatttcggccgcctttttcatctgcgcctcgagccgcgcgatctcggcccggcgctcggcctccgtcatcttcacgccgtcggcgcgtttgggcacctcgacgtcgctcgaaatttcaagcagttcgcgcacgctcttgacgatcgttttcggcacgataccgtgcgcctgattgtacgccgcctgcttggcgcggcggcggttcgtctccaggatggccgcgtgcatggcggccgtctcctgatcggcgtacatgatgaccgtgccctcggcgttgcgcgccgcgcggccgatcgtctggatgagactcgtctcgctgcgcaggaagccctccttgtccgcatcaaggatcgccacgagcgacacctccggcagatcaagcccctcgcgcaggaggttgatgccgacgagcacgtcaaacgcaccggtgcgcaggtcgcggatgatctccatgcgctcgatcgcgccgatgtcgtggtgcagataacggcagcggatgcccgcattcgtgaggtaggccgagagatcctcggccattttcttcgtgagcgtcgtcacgagcgtgcgctcgtttttggcgatgcgcgcgttgatctcgccgatgaggtcgtcgatctgtccctcaatgggccgcacgaagatctgcgggtcgagcaggccggtcggccggatgatctgctcggcgatctggcccgcgtgctcacgctcatagtcgcccggcgtggccgagacgtagatggcctgatgcacccgctgctcgaactcctcaaacttcagcgggcggttgtcatacgcgctcggcaggcggaagccgtactcgacgagcgagtccttgcgcgcacggtcgccgcggtacatggcgcgcacctgcggcagcgtgacgtggctctcgtcgacgaagagcagaaagtccttcgggaaatagtccagcagcgtcatcggcgcgctgccgggggcacggccgctgatgatgcgcgaatagttctcgatgccggagcagtagccaagctcctgcatcatctcaatgtcatagtccgtgcgctggcgaatgcgctgcgcctcgaggagcttgccctgctgctcgaacgttttcacgcgcgcgtcgcactcggcgcggatctcgctgatggcgcgctccatcttctcgtgcgtcgtgacgtagtgcgacgcgggatagatcgccacgtggctgagcgtgcggatgggcgcgccggtgacgacgttgatgtccgaaatgcggtcgatctcgtcgccgaagaactccacgcgcacggcatggtccgaggaataggccgggaaaatgtcgatcgtatcgccgcggacgcggaacatattgcgcgcgaaggcaatgtcgttgcgctcgtagcggatgtcgatgagcttgcgcatgagctcctccgggtcgcgctgctggccggtgcgcagggagatgaccatgttggcgtagtcgatcgggtcgccgaggccgtagatgcaggacacggacgagacgacgatcacgtcccgccgctcaaacaggctcgacgtggccgagtggcgcaggcgctcgatctcatcgttgatggaggcgtccttttcaatgaacgtgtccgtgtgcgggatgtacgcctccggctggtagtagtcgtagtaggagacaaaatactccacggcgttgttcgggaaaaactccttgaactcgctgcacagctgcgccgcgaggatcttgttgtgcgcgagcacgagcgtcggccgctggacgcgctcgatgaccttggccatcgtgtacgtcttgccggagccggtcacgccgagcagcacctgctcgtcgatgccgttttccagcccctgcacgagcgtgtcgatcgcctcgggctggtcgcccgacggctcgtagggcgaaacaacttcaaaatccggcacgaaacggcctcccttcgtgaaaaatcaaatcagaatattataccaccatccgccttgtttcacaagcggaaaacgcccggaagcagtggcttccgggcgcacaacatgtctgcaattattcgccgaaatcgagcacgcggcgcatgcggatgagcgtcaggcggttgcggatggccgccgaaacgctgagcatgtcctccgacagggccggatcgataccgatctgctcgggcttgtagaacgcgccgagcttctcgcacagcgcggccagctcctcggccgaggggatctcggcgatgatggcgcggatctcgtcccagtggtcgacgatgttctgcgcatcgaacgtaccgagcacgtcattttcgttctccttcatgatgccgtcggcgagcgggccgaacttctcgtccacccacgcgcggctcagcggctcaaagggcttggccttcggcgtcgggagcgaggcgaggtagtggtactccttcgcgcacaggtacgtgcccacgccgacgcactggccgtgcatgccgtgcgcattttcaaaccgcggcggcttcatctccaccagatgcgccatcaggtgctcggcgccggaggcggcgcgggagtggttgagcagctgcatggtcaggccggagatcatctgcgccatggtcatggcctcaaagtccggcttgccgccggccgccatatcgtcggccgccttgcgcatgatggtcagcgcctcctgcgcgaggtcggcgaccatcgggcagtaatactcgcccgagacgaggtgcgcgatcttccagtccgcgagggaaatgtacttggccagaatgtccgaaatgccgctcacggtcagccacaggggcgcgccggagacgacgttcaggtcgcagacgacgagcgccgccgcctgcatggggatggactttttctgtccgtcaatgatgatcgagcagatgttggccgtgaagccgtcggagctcgccagcgtcggtacggcgacgaacgggatgccgaggtggtaggccgggtagcggccgaagtccatgatcgtgcccgagccgaccgcgacgatgacgtccggatggtcaagctggcgcatcatgtcctcgatcatgcccttttcggagtgcaggccctcggcgttgaggacgatctcctggtcggcgcgcacgtgcctgagcgtcgggaggttgtaggtgttcgtatcgtaaatgacggcgcgcttgccgctcaggccgacctcgtccatgtactggtcgaacttgtcgagcgcattatactccacgacgaccttcttcgtctccagtgtgtgctcgcggccgcagcggcacgggccgacatatttgctgcaatcgagaatcatgcaaacatcgctcctattccagatagaatttttccttaccagcatattgatttttcccggcaaagtcaagccctccggccggatatcgcgcccaaaacgcagaaaacattctattttcgttttcattgaaaaacattcatccaaaattttaagggtcgatgccgccggtaacggttgcaaaatccatgcgcacggtgtaagattgcaaagtcgctttacagagattttaaatcctttttacactctggcgaactttttcgtcttttctatagatattctttgtacctggacggtgatttcttatggaactgactgcgatcgcgcagtggctcaacaccgcgtttgcgggctatgactacgccattttgcaggcgctgcacaatctggccgaagcggtcggcggcttcttcacgccgctgtgccgggccatcacgctgctgggcgagaagggcatcctctttctcgtgctcggcatcgtgctgatgctgtttccaaaaacgcgcaaggcgggcatctgcatgttcggtgccgtgtgctgcggcgcgctcatcacgaacttctggctcaaggactttgtcgcccggccgcgtccgctgacggtagagcccttccgcacctggtggcaggccgccggcgcgtatgccgagagcgagtactccttcccctccggccatgtgacggccgcgatggccggcgtgaccgcgctcgtgctcacaggcaaaaagcccgcgcgctggtgggcctatctgttcgtggcagcgatgggcgtggcgcgcaactatctcatggcgcactacccgtccgacgtgctcggcgggatgatcgtggggctgatcgccgccgcgatcgcttatgcgatcacgctgctgatctaccgcatcgtgtcggcgcacccggacaatcgcttctgccgctttgtactccacggcggcatcggcaggaaaaaagagcggcagaccgcatgagcctgccggacaagaaagcccgcttcgcacggccatgcgaagcgggctttttttgttcttatgcctcggcgggcgggttctccgcagccttggcgcggatggtatcgatgaccttgcggcagcgcgcggcattgtacacgaccggcaccggatagttcgggttggcctcggccagcgcccaggtgatgatctgcgggatgtcctcttcctgaatgaagtcaaagcccttcgggatgcccatgcgctcgttcatggcatagatctccgcgatgaaggcctgcgccttctcggcatccgtgccgtcggccttgacgccggcgatctcgcacaggcgcgcgagcttcggatacacggcctcaccgtagtcctcgaggacgatcggcaggatgaccgcgtttgccagaccgtgcggcgtgttgtacaggccgccgagcgtgtgcgcgatggcgtgcacgttgccgacgccggcgcgggagaaggcaaagccggccttgaaggcggcgatcatcatgttctcgcggaccttaagatcctcgccgtgctggtatgccagctcgagattatcgaagatgagcttgacggcctcttcggcgaggcgcaggctctccttggtgttatacgtccagctgatgtacgcctcaatcgcgtgcgtgagcgcgtccatgccggtggtcgcggtcgtgcgcggcggcaggccgacagtcagctccgggtcaaggatggcatacagcggcatgagcttgagatccatgagcgcgtacttgtggtgcgtttcgctgtcggtgatgacggcggcgatcgtcgtctcgctgccggtgcccgacgtcgtcggaatggcgacgatgggcggcacggtcttgccgacgcgcatgacgccggccatatcgtcgcagctctttttcgggcaggcgacgcgggcggccgcgcccttcgtggcgtccatcgggctgccgccgccgagggcgacgaagccgctgcagccggtgtccgtgtactgcgtgcggatcttctcgaccgtgttcaccgaggggttggcctcgacctcactgaacacctcgtaaggcatgccggcgtcctcaagcgcggcaaacagcttcggcccgagcgacttgaccacgtgcgagccggtgacgaccatgaccttcgtcacgccgcacttacccagcacatccggcacctgccggatgcagccggcgccggagatcacgatcggcttgcgccagtgcaggcagcgcatgccaatgtcaaacacctgctgataagtacggtaatatgcttttttcagtccatccataaacgattccttccctccgccggggcggatatatccgttttccatccctcttatagtaccggatcacaggaatttgtcaagcatttttgtgcagaaactgacaaagcctcccgctgcggatcagagcatcccggcgagcttgcggcccatgagcacgcccatggccgaggccatcatcaggccgcgcgtccagccggaggaatcgcccaggcagtgcaggccgggcacgttcgtgttcaggtcggcgtccatggcgatgcggttgctgtagaacttcagctccggagagtacagcagcgtctcataggcggcaaagccgggcacgacctcgtccatggccttgatgaagttgatgatattgagcatggcgcggtacggcatggcggacgtgatgtcgcccgcgacggcgtccggcagcgtggggcggacgttcgactgcatgagctccttctgccaggtgcgcttgccgtcgaggatatcgccgaagcgctgcaccatgatgtggcccgcgccgagcatattcgtcagctcgccgaccttctgcgcgtaggcgatcggctggttgaacggcacggagaagttgtgcgagcagaggatggccacgttcgtgttgggcgacttgagctccttgtaagcatggccgttgacgacggcgaggtcgttatcatagttctcctgcgacacaaagccgccggggttctggcagaacgtgcgcaccttgttcttgaacggggccgggtagccgatgagcttggactcgtacagcacgcggttgaccgactccatgatctcgttgcgcacctcgacgcgcacgccgatatcgaccgtgccgggcttgtgctccacgccgttctcgaggcagaccttctccagccagtcggcgccgcggcggccggtggcgatgacggtgtgcctggcctcgatggtgtagtcctggtgcccatcgtgcgccacgacgccgcagcagcggccgtcgcgcaggatgacgtcctcgcacgtgcagccgaagagcatctccaccccgtggtcgcgcaggtagttttcgatgccgaggtagacctcgtgcgccttttccgtgccgaggtggcggatcgggcagtcgaccagacgcagacccgcgcggatggcgcgcgtgcggatgcgcttgacctcctccgtgttctcaaggccctcaacgtgcgcatcggcgccgaactcgaggtaaatgctgtcggcgtaattgatgatctcctgcgcctgccgctcgccgacgagcgtgggcaagtcaccgccgacatcgctgcacagcgagagcttgccgtccgagaacgcgcccgcgccggagaaaccggtcgtgatgtggcaatacggcttgcagttcatgcaccggccagtcttggccttcgggcagcggcggttttcaatggcctgcccctgctcaatcatgacgatcttttccggggagccgcggcgcagcagctccagcgccgtgaagattccggcagggcccgcaccgacaatgacaacatctgcgttcatgaaggttcctccttagattgtgttttctttctctggatctgaccaaaaacgcgctgctgagcgcagcaaagcacagcaaaaacaccgcactgtgtgcggtgtttttgctgtgtgtggttctcgatctggagcgggcaacgagattcgaactcgctacctccaccttggcaaggtggcgctctgccaaatgagctatgcccgcatttcgtgaatgcaagcgttattttaccacaaaaagccgacttgtcaagccttttttgatcttttttgcgaatccggcgttacagcttctgtccctcgcgccagatgaacgactgcgccgcgcaggccgggcagccctccgcgtcccactgataggtgctgcgcatgctctcatcgctgcgcagccacagcgtctccgactgcatggacagatccagatgatagtaattgccgccgacctgcacgatgttccagcagcgatccgtcccctggaagcggccgctgacgacctggcacgggatgttcagcgcgtcgcagaccgccttgtaggccatggccagaccgtaactgtcggcagaaccgttcacgagcgcatcatacgccgtgctcacgggcgagatccgctgctcgcaggcgcgcatgacgacgagcgccgcctgcagcggtgtctcctgctcgcctgtcgtgagcgcagacgtaagcgtgcgcacgcggccgtcgagctgggtgcggcggtcattgaccgcggattcgctgacactgtactgcagcgtgatgccgaagatcttctggctgttgctgctgccgctgtagaccgtcacgtcgatgctcgggaaatccacaacgagctgcggctggttcaggcacgccgagcgcacgagcgcggccacatcgtccgtttcgagcgtgctggtgctgatctggatggcaaactgcgtcttttgccggtcgagcgcatcgaccacgcagtcgaggatgctcttttgcgtctgggcgctgtaaatggagcgcacctcgctctccggccggttgtaggtgatggtgatgctcgcctcgcagtaggcgatcacctgctcggtctcatagctgacgctctcgatacagtacgcgccgatggcagtgccggtgcgcagctcctcacaggcggcggccagatcgtcggcaatgatgccgtcatagtcgccgaaggccagcacgaacgagcgctcgtactgcgccgccatggtattgagcgcgcgcatgagacccgcataattgcggatctgcgtcgtgtcggcatccgtcaggaggttcgacggctcctcatacgggcgcaccgacagatattccttgtcaaacacggacgtgcatccgcacagcgacaccagcagtgccgccagcaggatgccggcgatgcagcgtttgtgcataccccgctcctttcaatcgtcgccgtagatgtttccaaagccgcggccaaagacttccttggcctcggacacgatgacaaatgcgtgctcgtccaccgagcgcacgacctcgcgcagctgggcgatctccggccgcttgaccacgcagaggatgacctgcatttccttgccggaccacgcgccctcgccgcgcagcagcgtgacgccgcggcccatcgtgcaggtgatggcgctcttgatggcgttgacgttgttcgtgatgatgtagcacacctccgacacgccggggccgtagagcacaaggttgacgaccttcgagctgatgaacatctcgatcatggtgtacatgcagctgtcgtactttttgaacaggaaggcaaacgtcagcacgaccacgacgttcatgccgaacagcagcgtgccgaagttgatgtacggatagcgccggcgcagcatcttggccacgatgtccgtgccgccgccggtcgtgccggtggtatagatcaggccgtagcccgcaccgttgagcacgccgccgtaaactgcgccgagcatcggctcgtccgtcacgacaaggccggtcagcgcgagcgcgtcgatgagcacggagatgagcgccatgacgcacagcgccagaacgagccggcgcgtgccgaggcggtgccgccagccgagatagaaaatggggatgttgataaggatcgacagcacgccgacggggatgccggtcagcaggcggatgatctgggcgatgccggtcacgccgccggagacgatgctgttcgggaatgtaaagaactggaacgccgcggccacgagcgccgaaccgacgaccagcttcatataatcaaaagcggaaaagcgatgcagatccatatctctctctcctcagatcaggctcatctgctcctcgccgcggtcgtcctcgcgcagcagcgcgccggcggccggcagactcctggcgcggtagcgcgcatggttgcggatgagcgtatcgggcgcaaactgtgcctgcgtgacaacggcctttttcttcagcgccatgacggcgacgccctgcgtcgtgcgcgaggccttgagcgacacggcctccggcgggaagagcagcgcgcgcccgtcggacgcaaagagcacgacctcgctgccctcgtacagcggcagcacggccacgagcgggctcttgtccgaatacgcgccggtcaggcggcggcggttcgtcttggtctcatacgccgagacggggatgcgcgcgaccttgccgttttcgaatacgagcagcagctcgccgtggtagtcgccggggtcgaccatgcacaggacgtgctcgtcggcgtccatggacagcaccgtcggcaggtacacgccgagcacggacgccttcgtgtccgcaaagtcgcagagcttggccttatacacctgttgacggtcggtgaagatgagaagttccccgcggttcgtcgcgccgaagctctggctgagcgcgtcgccgtccttatacttctgctcgccgctcatgcgcagcgactgcggcgtgatcttcttgaaatagccctcgcgcgagaggaacagctgcaccgggtaatccggcacaagatcctcggccggcatctgcgccacggactccgccgcgacgatgcccgtgcgccgcggcgacgggtacttgcggatgatctccttgagctcgcggatgatgatgccgcggatgcggcgcttgctctcgagcgtcgcctcaaggtcggcaatgtctttttccagcgcgtcggtctcggccgtgcgcttgaggatgtactcgcggttgatgttgcgcagcttgatctcggccacgaagtttgcctgcacctcgtcgagatcaaaacccgccatgaggttcggcactacgtcggcctcgcgctcggtattgcggatgatggcgatggcgcggtcgatatcgagcaggatcttgccgaggccctgcagcaggtggagcttggcgcgctttttctgcaggtcgaagaacacgcgccggcggatgcactccatgcgccaggcgatccactcgtcgaggatctcgcccacgcccatcacgcgcgggttgccggcgatgaggatgttgaagttgcaggcgaagctgtcgcacagcggcgtgagccggaagagcttttgcatgacctgctcgggatctgcgccgcgcttgaggtcgatggcgagcttcaggccgctgaggtcggtctcgtcgcgcatgtcggccacctcacgcagcttgcccgccttgacgagttcggccaccttgtcgatgacggcctcgacggtcgtggaatacgggatctcatagatctcgatgatgttttccttcggcaggtggcgccagcgggcgcgcaccttcacgctgccgcggccggtgcggtagatctgggccatctcgtcgcggtcgtacaagatctcgccgccggtcggaaagtccggtgccgggagcgtcgagagcaggtcgtggttcgggttctcgaggtaggcgatcgtcgtgcggcagacctcctcgaggttgaagccgcagatctggctggccatgccgacggcgatgccgaggttcgccgacacgagcacattgggaaagcgcgtcggcagcagggccggctctttcatggagccgtcgtagttatcgacaaaatcgacggtgtcgctgtcaatgtcgccgaagagctcggcgcagatgggcgcgagcttcgcctccgtgtaacgcgaggcggcgtaggacatgtcgcgcgaaaacaccttgccgaagttgcccttcgagtccacaaatggcgtcagcagcgcgccgtaacccttcgagagacggaccatggtctcgtagatcgcagcatcgccgtgcgggttgaggcgcatggtctggccgacgatgttggccgattttgtgcgcccgcccgtgagcagattcatcttgtacatcgtgtacagcagcttgcggtggctgggtttgaagccgtcgatctccgggatcgcgcgcgagacgatgacgctcatcgcatacggcatatagttttgctccagcgtctcggtgatgggctgggagatgacctccgccttgagcccgacgacgttggggtcaacggttttcttgatttccggtgctttttttctcggcataacgttaccgttcctttacgcaagtttttctcaggaaatatcggccagatcgagaaactggctgccgcactcggcgatgtgcgccttgcgtccggcgagattgtcgcccaggagcaggtcgaacacctgcgccgtgcgctcgacgtcctccggcatgacacggatgagcttgcgcgtgtcggggttcatggtcgtgagccacatcatctcggggtcgttctcgccgagacctttcgagcggttgatgtccgcctttgcgccgccgaggctgtcgacgatggccgccttctcacggtcggaataggcaaagtaagtcttgcccttgctcgcgatctcatacaggggcgactcggcgatgtacacatagccctcgcggatgagcgtcggtgcgagccggtagagcatggtgaggatgagcgtgcggatctggaagccgtccacgtcggcatcggtgcagatgatgaccttattccagcgcaggttctcgagattgaacgccgagagatccttggcctgcttgctctgcacctccacgccgcagccgagcacgcgcatgaggtcagtgatgacatcgctcttaaaaatgcgcgcatagtccgccttcaggcagttgaggatcttgccgcgcacgggcatgatgccctgaaactccgcgtcgcgcgagagcttgcacgcgccgagtgcggagtcgccctccacgatgtagatctcgcggcgggagacgtccttcgagcggcagtcgacgaacttctgcacgcggttggcgaggtcgacgttgccggtgagctttttcttgatgttcagacgcgctttttccgccgtctcgcggctgcgcttgttgatgagcacctgctccatgacgcggtcggcctcggctttgtgctcgatgaaatagatctcgagctgggcgcggaaaaactccgtcatggcctcctggatgaacttgttcgtgatggcctttttcgtctggttttcgtaggacgtgatggtcgaaaagcagttcgtgacgaggatcaggcagtcctgcacgtcctgaaagctgatcttgctctcgctcttctggtacttgccctgctgcttgatgtaggcgtcgatggcggaggtgaaggcgctcttcgtggccttttccggcgcgccgccgtactccagccaggacgagttgtggtagtattcaatgtcattgacgcggttggaaaagcagaacgccgccgagatcttcaccttatactccggcttatccgcgcggtcgcggccgcggcgctcggtctcgatgaacgtagggacggtcagcgcgtcctccccggccagctctttaacgtagtcgaggatgccgtcggcgtagcagtagtccgtcgtctcaaacgcgccgccgcgctgcacgcgcaggcggaacgtcacgccgcggttgaccacagcctgccggtgcagcacgtcctgaaaatagctctcgggcacgtcgatgtccgtgaacacctccagatccggccgccagcggatggtcgtgccggtctttttgcggtcggccggggcgctctcgagcccgccgacgacctcgccgtggcgaaaatgcagggtgtattttttcccgtcgcgccagatggtcacatccatgtattccgaggcgtactgcgtggcgcacgcgccgaggccgttgaggccgagcgagtactcgtagttttcgccctcgttgtttttatacttgccgccggcgtacatttcgcagaagatcagctcccagttgtagcgctgctccttctcgttccagtccaccggacagccgcgcccgaaatcctccacctcaatggacttgtcttcgtagcgcgtaacggttataatattgccgaatccctcgcgcgcctcgtcgatcgcgttcgaaagaatttcaaacaccgcgtgctcgcagccctccagcccgtcagagccgaagatgacgctggggcgtttgcgcacgcgctccgcgcccttgagcatcgagatgctgtcattgccgtaagtcgttgttggggcctttgccatgtcgttggatccctctcatatcacaagatgtggtagcattcgtttcataccttaactaatctagtatagcgtatcaaggccggaaatgcaaggaattccaaaaaatagacggggaacacgaaaagtgtgctccccgccgccccggaactttttgggctgtcccctgccgctccggcacttgacgcaatccgtgccgaacggcgttccggtggtccggagcgggtcgttcccgcgctggatgcaacagcctgcaaagctcttgcagggatcggatgctgcgccgcggcctgtgtgccgggcggcctccgcgggtttgcttcgctgcagcgcgcgtcggatatgttgtccaggcacagtatgcgcgcgtcacccgctgctatacctggaaaatttcgctgcgctctgactaaaaccaccgccgctgacatagaatatacagaaaagcgaacggaggcttttccatgtccagtcagagaaagcagcagcgggcgcaccgcgcagaggtgcagcgcgtgcgcgccgagatgctcggcgtgcgccgcgagctcgaacaggcctacaacgagtttgacaacatcaccgatcccctgctgatggaggcgtgcatctatgagatcaacgcgctgcgcgcaaagtacaactgcgccgtgcacgatctgaaaaatctgacacaataggatggtttcttatgtcgcaaacacttacggacattctggtcgtgatcgcggccgtgtttctcgtctggctggtcattcggctgttccgaaagccgatccgctggatcctgaagctgctgctcaacacggccatcggcttcgcggcgctgtttctgctcaactttttcggcagcgccatcggcatcacgctcggcctcaactggatcaacgcgctcgtcatcggcgtgaccgggtttccggggctggtgctgctgctgctcatcaaatatctcttttagcctacataaacgtttccccgcatccgaagatgcggggaactgctttatccgggcgcgccggcgctctgcgtcagttccggccacgtgcctgcggtattgtaattgtcgcgcgtgagcgtccaagtgtacggcgcggcgagcgtgatgttctgcgcgtccacggctgcttttgtgagcgcatagcaaaaatcatgccacgcatcggcctcgtcgcgcgtgtgccccgccgcaaggaaggccgcctcctgcgcctgtgtgtagctttcgagcgtgagcataagcttgcgtgtctcgaacatggaggcccagtaggcatcctccgtcatgccggaggcgcggttttgcgtgcacatgttttcaaacgtgtgcgccgtgatcgtgaagtccccgcccgtgatgcccggcgtctcgtcgccgggctgctgggactcggcatatgtctttcccgcgttgcggtaggccgtgtcctctatcggccgcttcgccgcaatatacagcgcaatgcacatcgccagcaccgcgatcagcacgcaccagaggatgatcctgctcgttttcgacatggtcgttccctcccaaaaccacgttatgtaaacttatcactcccatttccaatattcaaagtaccatattccggcgggaaagaaaagtaattccccgatattggggcaaaaaacacgccgggtgaagttttgcttcacccggcgtgttagtatattcgttctattttcaggcggcgaaccgcgcgcctgtcagggctcagtcattgaccgtgaccacattgtccgcaacgacggcggacgcttcaccattcggctgcaccgtctccacatacgtgccggtgctgcctatgtaggggttcatctcgcgcgctttgagcgcggcgtaaatgcccgcgcaggcaaccatcattgcgatgagcaggccccacagaactgcgatcttagtctttgccatgacagattcctcctttaagaaatcaaacgtgtttttattttttatcttcttgcgttccgctttccacacttcccacacaggcggcaacagccgctgcggcgaatcggaacgaacactgtcgagctttgttattttcttatcaactgcattgtagcgccatttttgccatttgaaaagcccttttttgcatttctacttttttaacaaagctgtttgatttttaacgttacgtttttgacgaattgacgaaacgcgaaaataccgggcgaagcaatgcctcgcccggctggaaattcactgtatttgctatgcaaaagcacagcaaaatgagaaatgtgccatttcctcgcccctgcagggcaaccggaaaggatgcacaaggacttcatgcaccggcatttgcactttttcgtggtgcagtgcgcatgcatgaagttttacgcctgtgtcagcgcctgaacgatgcgctcaaactgcatgctgtgcgacgctttgacgagcacgcagtcccccggctgcagcaggcccggcaaggccgggagcagcgcatcgagcgtgtcaaacgacgcggtcgcaacggcgggatcctctgcggcagcacctgcagcgatctgccttgccagctccccgcaggtgatgacgagcgacacgccggctttcgccgcgcagacgccggtctcccggtgcagagccgcggcgttcgtgccgagctcacccatgttgccgaggacggccacccggcggccggccggcaaggtcgccatggagcgcagcgccgccgccgtggagtcgggattggcattatagcagtcgtcaatgaccgtatagcgcgccgtgcgcacaacgcgcgcgcggctgccgaccggctgataggccgcgatgccgcggatgatctcatcatccgtcaggccgtattcgataccgacggccgcgccctcgagcgcggcatagaccatgtgctgcccataggccgagatgcgcaccgggatgcgccgtgtacccgcaatgatcgtgcaggtgctgccctcgtcgccgaggtcgcgcacgtcgaccgcgcgcacgtcgcacccggccgagaggccgaacgtcaccttgcgctggcggcaggtcatggcgcgcagcaggtcgtcgtccccgttgcagaaggcgacggcatcgtccggcatggtgtcgagcacggaggtcttttcctgcaggacgccgcggcggtcgcgcagaaactccaggtgcgcgtggccgatgatcgtaaagagcatggccgtcggctgcaccatggcggccagcggcgccatgtcgccgaagtgcgacacgcccatctcgacgaccgcggcctcgtgctccggctcgagccggaagagcgtgagcggcacgccgagctgattgttgaagttcttttcggttttcagcgtgttccagcgctgcgagagcacggaggcgaccatttccttggccgtcgtcttgccgacgctgccggtcacgccgaggaccgggatggaaaagcgggcgcggtaggcgcgcgcgagcgtctcgagcgcggcggccgtatccggcacgcagatgaccgggcgggtctcccccgccgggacgcgctgcgcaaggcagcaggccgcgccgaggtcgaacgccttgccaatgtagtcgtgcccgtccacccgctcgccggggatggcggcaaagagcgcgccgggcgtgacggcgcggctgtcgatggcgacgccggtcacaagcgcagccccgtcgcccgagagcacgccgctggtgatggcggcgatgtccgatacgcagtagcccgtcatcggctcacttgtgcagcgcggcggcgatgatctgctcgcacagctcgctgtagctgatgccgacggcggcggcctcctgcggcacgaggctggtaggcgtcatgccaggcagggtgttgatctcgaggaaccagagctccccttccgcgtcgaggatgaagtccgcgcgggaataggccgacaggttcagcgcatggaacaccgtgagcgcggcatcggccaggcgctgctcggtctcggccgggatctcggccggggtgatctcgcgagcggcgccgggctggtacttgttgcggtagtcataaaagccctcggccgggatgatctcgatgctgggcagggccttgtcgccgaggatgccgatctgcacctcgcggccgcagatgtactgctcgatgaggatgcggctgccttcgttggcggctgctttcagcgcagcgcgcagctcggcctcgtcattggcgatggacacgccgatgctcgagccggagtcgtcgggcttgacgacgcagggcagcttcgcctgcgcgcagacggcgtcgatgtccatgccgtcgctctcgacgagcatccacgccggggtcttgacgccaagcggtgcgacgacgcgcttggtcaggtccttatccatggcgatggcgctgccgaggtagccgctgccggtataggggatgccgagcaggtcgagcgtcgcctgcacgcggccgtcctctccggtgcggccgtgcagggccagaaacacgatatccgccatggcgcacacctcgagcacgtgctcgccgaacaggctcgggctctggagcttgcgctgcgcgcgcacggcctccagatccggcgcgctctcatcaatgcgcgtgccgccgagcgccggcggatcgtcaaacacatgggcgatgtcgccggtatagtcctcaagaccgaaaaacatatccagcagcacgacctggtggccgctctcctggagcgcgccggcaattttcgtgccgctcgagatcgagacgttgcgctcggggctcaggccgccgcaaagaactgcaattttcattgggaatacccccttcgttttctcatcgtaccgcccacggacggtattgtttgattatatcacactatgcgcttgcattcaaatatagaattcccgaaaaaagggcgtgaaagttgcgccattgtgtgctatacttctaatgttacaggaaaggacggaaagagccatgcattatgtcgtgatggatctggaatggaatcaggcgatgagttccaaatcctccgtattcaacaagctgcccattcacctgcgcggcgagatcatcgagatcggcgcggtgaagctcaacgaggacatgacccccggcgaagaatttcagatcgatgtcaagcccatgtacttcaagcgtatgcactacaaggtcaaaaagctcactggcttcgaccgtgagcgcctggccgccggcgtgagctttccggaggcgctggcgcagtttcgtgcctggtgcggggacgatgtgacgttcctcacctggggctgcgacgatcagggcatcctcgagcagaacatcatcatccacgatctggactgggattggatcgccggctggatcaacctccagctcatctacaacctccagaccgacggcgaccgcaaccagaaatcgctcgccacggcgatggagcactttgccatcgaacagacgcgcatcgcgcacgacgcgctcggcgacgcgtacaacactgcgctcgtgtgcacgcacctgaatatggagaagggcctggccgattaccacgacgccgcgcagaagctcacaacccggctgccgaaggagcaccacggcgagaataacggcccagatccgatcgagcacgtcgcgtcggagtcctatgcaacgaagtcggagctcttcggcgacgccgcgttcgtcacgccctgctgcccgctgtgcagcggcgaggtgcgctacagcaagtgggtcaaccagggcgaccagcgctatatggcgctcggcgagtgcccgacggacggcaagctgctcgtgcggctgaaattccgcaaggcggacgactgcacctggagcgccacgcgcctgacctatcaggcgacggacagcatggagagctactacaaggccaaggcggcccagccgcgcaagcgcggccgcggcaaatcccgccgccggccggccaagaccgcgcagtcagccccgcaataacccaaaacgcaaacccgcggccccggtactgagtaccggggccgcgggttttgtatgttcttatgcgtgctgggtctgcgcttcgaaataggcgcgggtcgtgttcgcatcgtagaggatgcgggccttgagcgcatcgacggagtcgaacttccgctctgggcgcaggaacttgtaaaactccagccgcacctgacggttgtagagattgccgtggtagtcgaggataaagctctcgacgctcacgcgctggccgccgctgaccgtcggccgcacgccgacattcgtgacggcataatgctcgctgccgtcgtcgagatacaccttcgcggcatacacgccgtggcgcggcacgagcaccccgtccgggaactgcatattgatcgtgggcgtgcccatctttgtgccgaggcggtagccgtagtgcaccgtgtccgacagcgtgtgcggatggccaaggaaggcgttggcgcgctcgacctcgccgttttcgagcagctcgcggatgtaagtggagctgacgacgcggccgtcgagcgtgacggcgggaatgacgtcgcagccgagcccgcgctcggcgcagtaagcggcgagcttttccgccgtgccctcgccccgccagccgaagctgaaatcgtgcccgacgacgaacgccgccgcgtccatctcatcgacgagcgtctggatgaacgtctgccacggcatctgcatgaccgtgcggtcaaagtggataaagaccacgctctcaatgccgaacaggcggcggatgagctcctcgcggccatgggcgctgttgatgagcgggacttccgtgccgcgcacgagcgtgtccgggtgcacgtcaaaactcatgaccgtggggatggcgcccatctccccggcgcgcgcgaccgtgcggcgcatgagcgcggcgtggccgatatgaatgccgtcaaaaaagcccagggcaatgacccgtttctggttttccatacgtcaagaaacctcgaaaaaacttttgatcgtgacggccatgccgtccgtgacctgcgccagcaggagaaactcccccgacgcagcatagatgcgataagttccgtccggcacgccgagtgcaaacggattgccgcagcgggcaagccgctccgagcgcgcatcgacggtgatccgcggtgcgtccggccagaggctgtcaaccggcaggagcaggcgctgcgccgcctcgcgcggcagcacgcacagctcgtccatggtgtgcgcatcctccacgcgatacccgccgacttccgtccggcgcagggcgctcatcacgccgccgcagccgagcgccgcgccgatatcgtggcagagcgtgcggatgtaagtgcccttcgagcagcggacgcgcaggacatagtccccgtccgcctcgccgagcacggtcagttcttcgatcgtgaccggacgcgccttgcgcgcgacctcgccgccgcggcgggcgatctcatagagcttctgcccgtcgaccttgagcgccgaatacatcggcggcgtctgcagaatatccccgcgaaactgcggcagcgccgcctccagctccgcgcgggtgacgcgccggtcacagcggctgagcaccgtgccggtcgtgtcctgcgtgtcggtcgtgaggccgaggcgcaggcgcgcctcatagcacttgctgtgattttcggagaacgacaccgcgcgcgtcgcgcggccggcaaacacgaccagaaggccggtcgccatcgggtcgagcgtgccggaatggcccatgcgccgctcgccgagcacgccgcggagcttggccacaacgtcgtggctcgtccagtccgcgggcttatcgaccagcaggatcccgttcatgcgggccacacctggtcgatggctgcaaggattttctccacggccgtttccgtgccgcagtcgagtgtgcagccggaggccatcttgtggccgccgccgccgtagaccgcgcagatcgcacacgcatccacctcggggttcgagcgcacggagatcttgctgcggccgtcgagcagctcgcggatcgtgacgctcacgaccacgccctctgcccggccgggcagaccggcgatatcgtcgcagtcatcctccgtcgcgtgtacgctgtcgatcagcgcgcgcgtgacgaccgcaatggcgacctgaccgccgcggaaaaagcgcatgccggagtagatctgccccacgagcgccatgcgcgcgcgggagatcttgcggaaaaagtccatgctgatcttccggttatcggcgccgagctccagcagccgcgccgccgcgcgcagagtggcggcgttcgtgttcgcgtactggaagcagccggtgtccgtcgtaacggcgatgtacaggaggtttgcctcctgctcggtgacgctgccggtcagcagctcgatcacatcgagcaccgcctcgccgcaggcggacttttccgcgtgcaggagcgtatcgccggcatacagcgcgttcgacgggtggtggtcgatgcacagatcgaccgcgccggaaaagccctgcgggaacaggttcggcgtcgcaatgtcgaccgcgaccacgcacgcaggcacaaaatccgcaggcgcaaaaaactgcgccacatacggcagatagcgcgctgtcgtctccggattggggaatagatacgccgtcttgcccatgcggcgcagtgcgctgcaaagcgccgcaccgctcccgagcgtgtctccgtccgggcgcaggtgcgacaggatcagaattgcgtcgcggtcgcgcagcgccgcggcaaactcccgatcattcatacttcaagcctcatttccggtgtccttgtcgtgcagatgctcgatcatggcgctgatgtgcgcgccctcctcgatcgagtggtcgatctcaaacaccagttccggggtgtagcgcaggtccagcacggtgcccagctcatggcgcagccagccggaagccgaacgcagcccctttttgaattccttctcgttttccatgccgagcacggaaagccagacttttgaatagcgcaggtcgcccgtcgtctcgacgcgggtgacgctgatcatcccctgctgcacccgggggtctttgacctgggtgagcaggtttgccagcacgcgctggatatcatcattcgttcttgccagtttgttggaagccataggaaactccttttactgcttgatctcctccatgacatacacttcgatcacgtcgccgaccttgacgtcgttgtacttatcgacctgcaggccgcactcataaccggcggcgacttccttgacgtcgtccttgaagcggcgcagggacgcgaggtcgccctcgaacacgacgatgttgtcgcgcacgacgcggaccttgctgttgcgcacgatcttgccgtcggtgacgtagccgccgcagacggtgccgaccttggagaccttgaaagtctggcggatctcgacgtggccgatgatctgctcctggaacttcggggcgagcatgcccttcatggccgcctcgatctcgttgatgcagtcgtagatgacgcggtacatacggatctccacattgctgcgggcggcgttgtcgcgcgcggccgcgtccgggcggacgttgaagccgacgatgatcgcattcgacgtggcggcgagcatgacgtcggactcgttgatggcgccgacgccggagtggatgacctgcacacgcacttcatcgttcgagagcttctcgagcgaggacttgacagcctcggcgctgccctgcacgtcggccttgacgatgatgttgaagtccttcatctcgccctgctggatgcgggagaacaggtcgtcgagcgagaccttcttgctgccggcgttggcggcgtccttcttctgctgctttcgctcctcgacgagctcacgcgccatgcgctcgtcggcgacggcgttgaacttgtcgcccgcgctcggcacctcggacatgccggcgatctcgaccgggatggacgggccggccttcgtcacgcgctgacccttatcgttggtcatcgtgcgcacacggccgacggctgtgccggcgatgatgatgtcaccctgatggagcgtgccgttttgcacgagcacggtcatgatcgggccgcgacctttgtccatgcgggcctcgatgaccgtgccgcgggcggcacggttggggttggccttgagctccagaatttcggcgagcaggaccaggttttcgagcagtttgtccacgccctcgccggtcttggccgagatcgggcagacgatcgtctcgccgccccactcttcgggcacgagaccgtactccgtgagctgctgcttgatgcggtcggggttcgcgccgtggacatccatcttgttgatggccacgaccagcgggatgccggcggccttcgcgtggttgatcgactcgatcgtctgcggcatgatgccatcatcggccgcgacgacgaggatggcgatatccgtgaccatagcgccgcgggcacgcatggacgtaaacgcctcgtggcccggcgtgtcgaggaaggtgacaggcttgccgttgaccatgacgcggtaagcgccgatgtgctgcgtgatgccgccggcctcaccggccgcgacgttcgtgcggcggatgcggtcgagcaggctggtcttgccgtggtcgacgtggcccatgaccaccacgaccggggcgcgcgggacgagttcgtcctcgctgtcctcgcggtcgtcgatcaggcgctcttcgaccgtcacgataacctcgtgctcgaccttacagccgagctccatggccacgagcgcggcggtatcgtaatcaatggtatcggacagcgacgccatgacgcccatcttcacgagacggcgcacgacttctgcgccggtcttcttcatgcgggacgcgagctcgccgacggagatcgtgtccgggatctggaccttgagctgctgcttttttgcgatctccagctgcagcttctgcatcttgtcgcgctcctcctggcggcgcttggcgccggcggcaggattctgcggacgctgacggttgcggttctggatcttctgcttgccgccgcgcttattctgcgcgcgctcgggcacgagatcgtccagacgctggtcgtacttggacaggttcgtcgtcgcgccgcgggtatcgacgacgcggcgctcggccacctgacgcggctggtgcggcttgtcgtccttcttcggcttgtgctgctgctgcggctgggtagcctgctgcggctgctttgcgggtgcggcttcgcccttgggcgcagcgccctgcgcggccggggctgcctgcggcttggccttcggctggtccggcactttgtagagctcctccaggctggccgcctgatggtgctgcgtgagatactcaaagatgtcgttgagctcgtcgtcctccagcacctgcatatgatttttcggagtggtggcataatccgtcaggatctgcgtgatctccttcgaggtcatgccgaaatccttcgccacctcatgcactctgtatttaatcaatccgctcatactcgtttcctcctcttgccgttgcgcccgccgcctgtcggcgccgtgcccgtgtctgttctcgtctgtgcggcaagctctgccgccgtgttgctgtattgctccggatctgcctgcgccagtgcagacacaaaggccttcgccaggcccggatcggtgactgccgcgatggcgcagccggtcttgccgagccggtcggacagcgcctgcttcgtgtacggcaggcgcagcagcggcgcctgcgccgcatgggcaaagccctcggcgcgcttgcgcgcattgtccgatgcgtcctgcgccagcagcagcaggcacgccttgccggcacgcgccgccgctccggcgtcatgctccccgagcgcgatgcgcccggccttgcgcatgaggccgagatagttggctgctttatccgtcgccgagcacctccagttccgctgcgagctgctcatagatctccgccggaatgggcacgtcgaacgcgcgctcgagcgcgcggttcttctgcgcctttttcaggcacacggccttcgggcacagatacgcgccgcggcccgccgccttgccgcgcgcatcgagcgagatggccccgtcgggcgcgcgcaccacccggatcagctccggtttgggcttcttttcacggcagccgacacactgccgctggggaatggacttgggcatgggtgactgcctcctttcggtttatgcctcgctctccggcttgatgtcgatcttatagccggtgagcttcgcggccaggcgggcgttctgcccttccttgccgatggcgagcgagagctggttatccggcacgatgacgcggcagctcttgccctcgtcgagcagggtcacttccagcacctcggacggcgccagtgcggccgcgatgaattcctccggcacctcgctgtacttgacgatgtcgatcttctcgccgccgagttcgttgacgacgcttgcgacacggccgcccttcgggccgacgcacgcgccgatcgggtcgatgaccggatcttccgcccagacggccatcttcgtgcggctgccggcctcacgggcgatggacttgatctcgaccgtgccgtcaaagatctccggcacttcgagctcgaacaggcgcttgaccaggcccggatgcgtccggctgatgagcacctgcgggccgcgcgtgctgttgcgcacctcgaccacgtagaccttgatgcggtcgccctcatgcagcacctcgccgcggatgcactccgccggggcgagcatggcctcagtatagtccgagttggagctgatcttcaaaaacgcgcagccggtgcgcgggtcgatcttattgacgacgccggtgaggatctcgtgctccttggagttgaactcctcgtagatcatgccgcgctccgcctcgcggatgccctgaatgatgacctgcttggcagcctgcgccgcgatgcggccgaactgcttggtctcgaccgggacgctgaccacgtcgccgatcttggcgcgcttgctgatgcggtgcgccgcctcctcgctgatctcgacatacgggtcgatgacgcgcgcgacgaccgtcttcttgacgaccatctcgatcttctttttcgcctcgtcgagaatgacctccacgttgtcctcgcagtcgggcgtgtccttgcggaacgccgtcagcatggcctgacggatcttctcatacatatattcgcgcggaatacctttttctttttcgatatctgcaactgcgtcaaaaaattctgcgttcatggtcgaattccctttccttatatggtcaggtgcaggcgcacctgtgcgatggcggatttttgaaagacacggcgggtcttgccgtcggagacggtcacgtcgccgttgtcatactgctcgagcgtgccaatgtgcaccttgctgccgtcgaccggctggtagagccgcacctcgacctgtgcgccgaggaagcgctcgaaatcgcccgggcgcttgagctgccgctccgctcccgcggacgacacctcgaaaatatagctgtcgggaatggggtcggcctcgtcgaggatcggatcgagcgcacggctgaaatcctcgcagtcctggatcgacacgccgtccggcttgtcgatatacacgcgcaggtagcggctgcccgcttccttgacgtactccacgtcccagatctcgcatccctgctgcgcggccacaggcccggccagcgccaggacggcatctgtcaatttactcatagatcaccattccattttctgacacttcgaaagacatcaagaaaaagagtgggcgagtgcccactctgtcaaatcctgcttccttcgtacggcaatatcataccatcccgcgccggacaatgcaagcctttttttgcgccgccggacacttactggtacaacgccacgaattcctccaggcagaggttgtgctcggtcatgaaccgcgccgccgcgtcgccgacatagcgcacgtgccacggctcgttgcgcccggtgatgctgaccttgtccgacgggtagcggatgacgaaaccgtagtccgcgcagttgtcggcgagccaggtcagaaagcgcgcgttgaccgtgtccacgctcagcgaggaatagtactggtcaacgatgtccgcgccgaggccggtctggtggtcgctcgtgccggggggcgcggccacgcgcgctgcggccgtctcagcctcgtcgcgcgtgtcgcccttgcgcatattctcgctgacctgatcctcatactgctgctcctgcgtcaggtacggacggtaggcgcagtagatatacggactccagccggcgtccctggccgctttgagcagcgcattgagcgcgtcgacggcgcgggaatcgaacgtggactgcgagccgctgatcttgctcacatccggaacatagtcgctgatattatgcgcctgactcgcaatgagatactcccaggaggaaatatccacatccggcaggtcgtcatacttcttcgtatcgggctgcgccgtcgtctggatgtccggcgggagaataagatccgtcggcgcggcgggcgcggcgttgctgcgcgtctcgttgatgcgcgagaggatgagcatagcgcatacgacgaccaggaccgtcagcgtcaccgacagccagagacgtttgttcttcatgcagatccctcccggacgaaaaaatgaaaagcagctcacacgagctgcttttcaggatagcatatttttcgcgttccggcaagtcccccgtcacagatcgacccgctcgtaatttttggccgccttccggtatgccagccacgacagcagcgcaaacgccgccagccccacggccagtaccggcagctgccgcacctgaccggccgcgtcggtcgcatcgagatacggcccgacggccggaaaatgggacagcgcctcgacgagcaccatgagcaccgtcatcgggatgaccgcgagcagaaacgctcgcccggcgcggatggctgtcttataaaacacgggcaggaacacaacgttgaacacgccgtagatcagcagcacgcagccgaagagcgcgacgtttgcgtcgatgccggcgaggttcgtgccgttgggattgatgcgcgcggagaggaacgcaaacgggaccgcgatcacgagctccgccagctccaccgccacgacgagccaggcgcgggcgcgcacctggtcacgcttcgtgaccggcagcacggcgcagtaatagacgtccttgttctcgcggccgttgagaaacgtaaagaaaatgccgagcaggccgtagaaaaatacgaccgtgtacggatagttcgggatgatgagcatgacgccgaagagcgcgaacacgtacatcatcgggtgcgctgcaaggcgcaggtccttagagaaaatcttcgccgtcatagcttctcctttccacgcgcacaagaatgtcctcgagcgacatctgcccgtcgccgaactgcgcgcgatagcgcgcgagaaacccgtcgcgcgtgtcgctgcacaggatctgcccgtccttgatcatcgtgatgtgcgaggcgcacttttcgagatcggacgtgatatgcgtcgaaaacaggatgctgcgctcgccgcttttgaccacgccgcgaaacagctccatgagctcgtcgcgcgacacggggtcgagtccgctcgtcggctcgtcaaggatgagcaggcgcgcatcgtgcgagagcgcaagcgcgagcatatacttcacgcgcatgccggacgagagctgcgagaccttcttcgtctcgtcgagcgcgaacagctgcagatagtgccggtatttgtcctcgtcccagcggtcgtaaaacgtccgcgtcacgttcgtgatgctgcgcagcttcttattcgggtaaaaatccacaccgccgagcaccacgccgagctgctgcttgcaggccggctcgttggcgtaaaaatcctggccaaacatggtcacgcggccgctgtccgggtgcacgagattgagcatggacttgatggtcgtgctcttgccggcgccgttgcggccgatgaagcccatgatcgtccccggctcgactgcgaacgacacatcgcgcagcgcaaacgccggataggtcttgcacaggccctccacttccagaatgttcacttgccgttccccttcttcaactcccgctccagcgcggaggcgaacaccttcgtctcggcctcgggcacatccggcgcggccgcctgcgcgccctgatcgaacaccgcgcgcacgaacgaatcgtagtagctgctgctctgcagcgcgatgccgcgctcgcggtccgccagcaggatgagcgagtcccccggcgcgagcccaaacatcgcgcgcacctccttcgggatcacgatctgcccctttgggccgatgcgcaccgtggtcatgaatttgtcctgcatggattccatgcgatccgcctcctgtaagaatcgtattacttttcttactttgtaccacaagttgaacggattgtcaatccggttttttgcgtttcagcgcaaaaataagagttatgtaaaccatgcaggcaaaaaacgatcccctgccggccggcaggggatctgttgcatatgagataacttagagcgcctcgacgtccttgatgaaagcctggatggcatcttccggaacgagcttcttgctgcgaacgagattgacgatgtcgccgacggtcttcttgtagaagagcttcaggggatacttggtcagggacggaaccgtcttcatcatgatctctttgccgttcatgtcctcgataaacgtcttcacactcagagttttgtaatccatgatatgttctcctttcaattttgagcacaccggccatttttcaatccggaatggccttctgttcaaagattaacgctttttgggcattttgtcaagtataacgtatgattttcttcgtcgcaccgtcattttttattcagtaatcaacgctttgttgtgtaacatttgcgcacatccggaaaattgtgtggcaggcaagtgtacttgcagccgccgaatagaatggccacaggcagaaacggagggctgaaaatgctgtacagtaccctgatgctgatgatgagcagtgcatttctgatgctgcgcctgacgcccggcggctcgttcccgcgtccgctgagcgaggccgaggagcgcaaatatctcgacgcctggctgcagggcgatctggaggcgcgcaacgtgctcattgagcgcaacctgcggctggtggcgcacatcatcaaaaaatactacacgcactatgacgacacggacgacctgatctcgatcggcacgatcgggctcatcaagggcatcaacacctaccggcccgacaagggcgtgcgtctggcgacgtacgccagcaagtgcgccgaaaacgagattctgatgtattttcgcagcacgcgcaagaatgcgtcggaaatgctgctctcggacgtgctcgacacggacggcgacggcaacaacctgtcgctgatcgacatcctgtccgaggacgacgacatggacgaacacctccaggcggacgaggtcagccgggcgctgcggcgctgcatcggcgaagtgctcgatgcgcgtgaagcggagatcatccgcctgcgctatgccatcggcggcggtgaggcgctgacgcagcgcgagaccgcgcagcgctgcggcatcagccggtcatacgtctcacgcatcgagaaaaaggccatcgagaagctgcgcgccgcgctgcaggccgacggttactgaggtgcacattgacaagcggcgcaaaacacggtaaaattgcggcgaaatgacaggagatgatacaccatggcggaacaggatcccaacacgatggtgcacacgcacgtggacgagaacggcaacgtcatcacccactgccacggcggcgaggggcacacccacgcgcacccgcacacccacacgcagaccaaggcggtcatcaaccggctggcccgcgcgatcggccatctggagtcggtcaagcgcatggtagaggacggacgcgactgtgccgaggtgctcatccagctcgcagccgtgcgctcggcgctcaacaacacagcaaagattatcctgaaggatcacatcgaccactgtctggccgacgctgtggagaccggcgaccagcaggccatcgacgagctgaatcaggcgatcgaaaaattcatgaactgaagtcgtgcatccctctgccccaccggcagagggatgcgccatatctgcgcgcagcaaaaaaggacgcccgaccgggcgtccttttcgttgcttgaattatgcggaccgttccaccgagagcaccgttccggtctgctgatcgacagccacgacgtagcgggggtggaagtagtacaccgtcgtaagcgtcacgcggtagaccggctgcacaccactctcgtcgagctgaacatcccacgcggccaggtcgctctccgagataccggccgccgcaatggcgatcttcagcgcctgctcctgcgtgaccgggccgacgggcggcgtcggcgtcggggcaggcgtcggagcaggcgtcggggcaggtgtcggtgtcggtgtcggtgccggtgccggcgccggcatcggggtgggcgtcggagtcggtgccggcgtcacgggcgaattcggccgcaccaccggcgagaccggaacgatctccgcctcttccggccgcttcggctcatcgcccgtcaggcggcagacctcagtcgtttcggcatcgacgctgcacacatagtgccgctcgccgtccgagagcacgaactccatgaccatctcgccgtcaatgagcgtaaagcgcatacttgccctggtcacgtcatccgtagtcaggccgcagcacgtaagcgccgcctgcagcgccttgtcatacggaacatatacgccggtgctggcagcgccgatggattcgatgccggaaagctccacctggttggacgccgccagaatgttcagatcattgatcggcaggccgaccagctcgctgccggtcagatcctgcacctgggcgctgatctgccggatcagcattgccttgccggcgctgacgcccacggcagaggcatacgcctccagcgcaggatcgtcctcgagcacctgcgcaaggaccgccgactccatgccgcagtccgtctgggcgctttccacagcgtccgccagccggccgcacaagcgcgcatcgcccttgccggcctcgaccgtcacaaggatcgaattcgcatccgccgagacatagccgttcgcctgcatattggcgacgatcgcgtccgccgccgtctgcagggactggttgcgcagctccagaccgtcgagcacaaactgggcatccggattgcacgcacgggcagacaggacgcggccgagcttattgaccgtcagctcgatgctggggttggcatcaagcgtggcgacgccgccgggcacctgcgtagcatacagcccgccaccgaggatgaccaggaaaaacactgccgctgcggcgacccagccccgccaggcactgcggcgcttgcgctccggcatcgggacgaccggcgcttcctccggctgctgcgccggagactggacgcgcgcaaggatgccgctccagcaatccggcgttacggcggcgacctcagcccgcagccgttccagcaattccttatcggtcaagatcgtcacctcccatcgaattgcgcagctttgccagcgcgcggttatagcgtgaaatagcggttgcctgcgggatacccagcaggtcggcaatttctctgtgcttgagtccggacagcgcgtgcagcatcacgatctgccgctcgccgtccgtgagcgtatgcagcactttttcaagcaccatatggttttccgtcgtctgataagcgtcatgcgtatcctccacatgaaacagctcatcaaaggacaggttcttactttctgccctgcgcaggcgcatcaacgccagattgcgcgcgatcgtcagcagccacgccatcggtttgcccgacggctgatagcccggtgccgactgcatcacgctcacaaacgtgtcctgcatcacgtcctccgccgccacaggatcccgaaggatggacagcgcgaagccgtaaatggaggaggacgtctggcgatacagcacttccagtgccgcagtatccccctgcgcgatgcgcagtatgagcgcatcatccggcggctggccgctggccatgcacgaaccggcgctgtgcatatcatcattttgcatagaattaccccacatgagaataatgcctgaaaacgaattttattgcaaaaaaatctgaattcgatcaatttttcggcgcaaaagccgtcttcggctcacaaactcttcttaaccaattatcatacgtgaaaattgtcggtttgtaaaggaagattccaaacttttctaaggaagcaggcacatctacggttcttgttccgcagtcacctcaagcgcatggttgagcagcacgccaaggatcagcagcagtccgaacgcctgaaaccagaacagcaggatcacggccgaagcgagcgatccgtacacgagggaatactttgtgctgttgccgatcagccacgacagcaggatgctcatgcacacgatcgccacggcggaaaacaccgcccccggcagcacccggtgctgcggccggcgcggcgtggtgagccggtagaggatcaggatcatcatcaacagaatggcaaacaggatcaaaaaccgcagccacgtccatgaccagacgatgctcacatgcggcagcagcgcatcgagccagagcagaaagtgcttgccggtcagcatgagcaggatgcacaggtacagcaccagcagaaatgccacggaaaaggccacgctcacgatcgtgctgcgcacgatgccgaagcgtttgccgccgtggatctcgccgacgatggcggccatggcgcggaaagcggccgacgcgctcgtgatcatgaccagcagcgcggcaaagaacatgacctcgctcgtgttgccggacacgtaagtcagaaagtccgatacgagcgcctgcgtctcgcgcgggagcacgagcgtctcaacgatgcgcagcacggcggccggatcgcgcaggatgagcgcgagcagatcgtatatgcagatgatggccgggaacagcgccatgaccatgcagtaggcgagctcggccgccgagcgcgtcacgcgccgggcgagaaacgtgtccgccatggacatcagaacgcgggtaatgcgccagtttttcaagcagctgcctcctccgttggaatgcaaaaaccgccttcacaggagcgaaggcggttttggtcaaaaaatgtcgaattacttggaattgaagatcttgaagatgctgtcgaacggatcttcctccgcgggcgcggcagcgtccgcagccggggcagcagccggagccggcgtcgccggagcggccggggccgcagccggagcagcagccttggcagcggtcgccgcggccgtgtagaggccggcagcgggggcctgcgccggagcggcggcagcctgctcggcctgcgccttgcccggctcgtcgaagccggtggcaatgacggacacgcggatctcgtcgtcgagcgagggatcgaagctcgcaccgaagatgatgttggcgtccgggtgcgcagcctcctgaacgaggtttgcggccgtctcgacatcctccaggcccatatcctcagagccggtgatgttgatgagcacgccgcgcgcaccgttgatggacgtctccatgagggggctggccacggccatgcgggcggcgtcctccgccttgcccttgccggcggcgcggccgacgcccatgtgggcgaagccggcgtccttcatgacgcaggtgacgtccgcaaagtcgaggttgatgaagccggtgttcttaatgaggtccgagatgctcacgacggcctgacgcaggacatcgtccgcgatctcgaaggcgttggccagcgtgaccttctggtcggtggcgaacttcagccggtcgttcgggatgatgagcagggagtcgaccttgcccagcagctcgttgatgccgaccatggcctgatccatgcggcgcttgccctcgaacttgaagggcttggtgacgacgccgacggtcaggatgccggcctcgcgggcgatgtccgcgatcgtgggcgctgcgcccgtgccggtgccgccgcccatgccggcggtgatgaagaccatgtccgcattctccaggctcttggcgatgttgttgcggctctcctcggcgctgcgcttgccgacgtcaggatcgctgccggcgccctgaccatgggtcagcttctcgccgatctggatcttctgatccgcgctcgaaacggccagagcctgcttatctgtattgacagccacgtactcaattccctgagtgccggacttaaccatgcggtttacgacgttgttgccggccccgccgacgccaacgaccttgatggtgacgacattttccggaccggactcggtagcaaaggacatattcggttcctccctgttgtttctatttgtatcggcggccggcgcatgcgcgctctggaagccgttttttggcgggttgcgcttctgtttgttcttattctttcccattttatatcgttttccttatcaggtcaatctttttttgtgaacaatcagccggggctgaaatgtgcgcgtttgtcgatcgacaggtcgatggtgccggcatcgctggccgtgagctgggagaccgcgctttgcagcataccgaatttgtactcgacattttcattcgcgccgaggcgcaccgtgaatcgtccgtcataggtgaagccggggttggacgcatccgacaggtcgatgaccgtgaccttggacgccatgtcgcgcgtgagcagctggccgaggatcgccgccagatacgtgactttcggtgcatcggcctcaccggcgttgagcacctcgccgaccttcggctcgaccggcgtaatgccgtcgacccgggcaaggccggtcagctcgctctccgtgacggatttgagcagcttgcagttctgatccaaaacccagtaaccgccatccgcctgaacataggccatggcgctgctctcctggatcgtgatggtgacgcggttgggcagcgcgcgcgtgaccttcgctttgtccacatacgggagcttgctgaagatgcggctggcggccgagaaacggttgatgaaaaacagattgtcgcccgtgccgatgccggaggcctcgacgacctcctcggccgtgtagatggagttgcccacgacctcgatctttgcaacacggaaaaatacgctcatgcccaggacgagcgccgcgcagatcagcagaaagatcagcggctgcagcagcgacctgccccggccgccggacgggcggcggggccggcgcgcgcggcgcggcccgggctgcttcgattgtttcatagacaggtgattcctttcaccgcggcgccacgcagcgcacatcggccccaagcgccgacaggcacgcatcgaagcggtcgtagccgcggttgatatagccgttgtcgaggatctcggtctcgccctcggcggagaggccggccacgatcatggccgcgccgccgcgcaggtcgctcgatgtgagcggcgcgccggtgagccggtcgacgccggtgacataggccacgcgcccctcgatgctgacggctgcgcccagacgccggaactcctcggcatgacgataacggttggtgaagatgttttcggtgaacaccgtggtgcccttcgccttcaggcaggcagccatgagcggcggctgcgcatccgtgggaaagcccggatacggttgcgtgacgaccggccgcggcgcggtgagccgcccggtcgatgtcaggcgcacggtggacgccgtttttattatagcacaccctgcctcggaaagcgagtccagaacggtcaaaaaatggtccggatcgacgccctgcagttccacatcgccgccgcaggcggctccggcacacaaaatcgtcgccgcgacgatgcggtccggcatgatcgtgtgctccacaaacggctgcggccggaagccgctgaccgtgaccgttgacgtgccggcgccggaaatgcgcgcgcccagcttgcgcaggtagcactgcaggtcgaggatctccggctcgcgcgcggcgttgcagatgaccgtctcccccgccgccgcgcaggcggccagcatggcgttttccgtcgcgccgacgctcggaaacggcagcaggatgcgccgccccttcagatcgtgcgcgcagcagacgatgtctccgccgcgctccgtgacctccgcgccgagcgcgcgcagcgcgtcgaggtgcaggttcaccggccgcgggccgagctcgcacccgcccggcatggacaggctcgccgttccgaagcgcgtgaggatcgcgccgagaaaaatgaccgaggagcgcagctcccgcatgagatcgtgcgggatgaagtcgcggttcatgccgcgggaatcaatgtgcaccgtgtccccgtcgcgctccgccgtgcagccgagatggcgcaggatgcgcagcgtgatcgtcacgtccttcaggtcgggcacgttgtgcagaaccgtctcactgccggcgagcacggatgccgccatgatcggcagcaccgcattcttggcgccctgcacctgggtgctcccggtcagtctgtttccgccgtaaatgtgccatatgctcataatctttcctccgcacagcaaattcatgccatcctatgcagagaaacgcgagattgtcattttgcgtgccggtcggccagtttcagcaccagatcggcaatgcgctcggcggcgtcggaaacgccggcggatttcatgttctgcgccatctgcgcaagctgcgcggggtcggcgagcaggtcgctgacgaggttatacagatcgtctgccgtgaacgcgccctcgagcagcaccttcgccccgccggcgtgctcgagcacgcgcgcgttgcgctcctgatggttgttcgtgacgttcggcgacgggatgaggatcgcgggcttgccgatgcacgagagctccgcgagcgtggacgcgcccgcgcggcagagcacgagatcggccgcgtccatgacgagcggcatgtcataaatatacggccgcacgtccatgccgtgcgcagcgagatcggccgggcacttttcgagcagggccgcgtgcatcttctcatagccgttgcgcccggccgagtggatgagcgcaaacggcgcgtccgtgacggcggcgcgcgtgatgaacgccgtcatgacctcgttcatgtacgacgcgccgagcgagccccagaccgacacgaccagcggcctgtccgggtcgagcccgagctggcgcttggcctccgccttggagcaggccgtgaacgcgccgcgcaccggcgtgccggtgacgacgaccttttcctgctcgctgtagtgctgcttgctctcctcgaagccgacgaggatgcggtcgaccgcgccggcaagcatcttcgtcgtcaggccgggcacggcgttggattcatgcacgacggtggggataccgagctgcgccgccgctttgagcacggggtagcagacatagccgccggtgccgatggcgacgtcaggctgaaagtcctcgatgatcttgcgcgcgtccttcgtcgcctgccgcgcgttgtgcagcgagcggaagttgtacgcgatctccgacggcttgaggctgcggtggatgttcgtgacctcaatggtcacgatgtcgtagcccgcgcgcgggacgaggtcggtctccatcttgccgttggcgccgacgaagaggatgccgcagtcgggcatccggtcgcgcaggatgccagcgaccgcgagcgcggggttgatgtggcctgcggtgccgccgcaggtaaagagaaaattcatagcaatgcctcccaggatcaaaaacggaaatcgggcagtccgcgccgaagaccgccgcgggctgccggatatacacttcaaagtcagaaactagcgcgcctttttcgtcggaatgtcgcgcgagatgctcaggatgatgcccatctccccgagctgcatgagcagcgccgtgccgccgtagctgaaaaacggcagcgagatgcccgtgcaggggatgaggttcgtgacgactgcgatgttcaaaaacacctggatcgacagcagcgtcgtgatgccgatgccgacgaggaagctgtagcggtcgggcgagtgcgcggcgatccagtagccgcggcagatgagcagcgcaaacaggatcaggatcgcaatggcgccgacatagccgagctcctcgcagacgatggaaaagatatagtcattgtgctcctcgggcagatagaggtacttctgccggctctggccgaggccgagcccgagaaagccgcccgagccgatggaatacagcgactgcacgatttgatagccggccgcgctcgtatcggcaaacgggtcgcgccaggacacgatgcgcttgtgcacatagggcacgaatttgcttgcgatgagcagcagcgcgcccgcgctgcccatgccgacaagcaggtacgagagcttgatgccgccgacaaacatcatcacgatcgcaagcgccatgatgatgatggacgccgacagatgcggctcaagcatcagcaggccgacgatgatgaccgtgacgaccatgaacggcacgacaccgtagcggaatgtctgcatctgctctttataggtgcagatcatgctggagaaaaacagcacgaccgcgatctttgcgatctccgacggctgaaacgtcgtgaagccgagactcagccaccggcgcgcaccgttgacgcgagtgccgatgtgcgggatccagacgacggcaagcaggaagatgctcacgcccagcaccagcagcgacagacggcggtaggtcgccatgcgcaccttggacagcaagatcatggccacaacgccggccacggcaaaggccgcctggcgcacgaagtaatacgtcggcgacttgccctgcgcatacgcgcgggcgaagctcgacgagagcaccatgatgacgccgatcgtcagcagcagcagcgtgagcacgaaaaacggcaggtcgaagctgccgcgctgcggcccggcggacgctttcgcctggcgcgcgggaagtctcagatcggaaatattcatataagcacctccctgcaccgcggcgcgcgcctcacacgccgaagcggtggaacacgccgatgaacgacaaaactgcaaacagcaccgtcacgccggcaaacagcgccacaatctgcgtttccttccacttgtggcccgtccagccgcccatctcgagatggtggtggaacggggacattttgaacacgcgcttgccgtgcgtgagcttgaagtagccgacttggatgatatccgacagcgcctcgatgatgtacatgatgccgagcgtcacaaggatgagcggcatgtcgtaggcaaaggccagcgccgcgaccgcgccgccgagaaagagcgaacccgtgtcgcccatgaacaccttcgccgggtggaagttatagatcaaaaagcccagcaggccgccggcaaggccggaggcaaacacgccgagggacaaaaaccgctcgccccagagcatggagatgacggcgaagaagatgcacaccggcatcgtcgtgctcgcggcgaggccgtccacaccgtcggtgaggttcacggagttgaccgtgccgacgatgacgaaggccgcgaagatgacatacagcggctcggagaccggcaccgtcttgttccagaacgggatgtacaggctgtcgagcgcgacatagccgaagcggcgcatgaggaaaatgaacgccacggccgccgccagctgcagcagcagcttctttccggccgtcaggccgagattctgctttttccggagcttttcatagtcgtccagaaaaccgatcgcgccgaacacgagcgcgaacgccagacaaaacaggtggccgtattcgccctcggccatgcactcaaagccgaccgacaggcacacgaccgcgatcgcggcgatgaacatcagcccgcccatggtgggcgtgccctgcttggacatgtgccacgtggggccgttttccttgatgctctggcccgccttgatgcgtctgagatacgggaccaggaaaaatccaacgacggccgacaccgcaaacgcgatgacgaacgccagtatcagcttcagtgtcatttctctctcttcctcttctcgagtatttcggcgacgatctcgcgctcgtccatgtgcactttcgtcttgccgatgatctggtaatcctcatggcccttgccgcagaggatgatgacatcgccggggcagtgattctcgatcgcgtaggcgatggcctcgcgccggtcgggccgcacgacatagggcgtgtgcgtctccttgagaccgggaaggatatcggcgatgatcgcctccgggtcttccgtgcgcggattgtcgctcgtgacgatgacgaaatccgccttctggcccgcgatgcggcccatcttcggacgcttgccgcggtcccggtcgccgccgcagccaaagaggaacacgagccgcgcgggtgcgaactcgcgcaccgtcgtgaggatgttgtcgatggcatcgggcgtgacggcgtagtcgatgaggatggcgtaatccccgtcggtctcgagcacctcggcgcggcccttgacgggctttgccgtgtcgagcgcggcggcgcagtcgtcgagcgaaacgccgagcgcgcaggcgcaggcaatgacgctcagcgcgttgtagaccgagaacatgccggggatgccgaggcgcatacgcgcgatcgcatcgccgtgcatggcgacaaagcgcacgcccgacgcgctcaggcggatgtccttggccacaaggtcggcgtcgttgcgtttggcggaataggtatgcatcgggcatttggcgtgctcgagcatgacgtgcgcccaatcgtcgtccgcgttgacgatgccgacgtcactctgcgcaaacagctgcgccttggccgcggcatacgcctccatggtcttgtgaaagtccagatgatcctgcgacaggttcgtgaagatgcccacccggaagcggatgccctccacgcggtgcagcaccagcgagtgggacgacacctccatgaccgcgtgcgtgcagccggcgtcgaccatccggcgcaggagcttttgcagctcataggcgtcgggcgtggtgtgctcggtgtgcagcacctcgtcgccgatgacgttcgcgttcgtgccgatgagaccgaccttcgtgtgcaggcactgctcaagcatgtgcttgatgagcgtggtgacggtggtcttgccgttcgtgccggtcacgccgatcatggtcagctcgcgcgacgggttatcgaaaaattcgcagcagatgcgcgagagcgcaaggcggctgtcggccacgaggatatacggtatctcgacctctggctttcgctggcagagcacgacggccacaccgcgctcggcggccgcgccgatgaaccggtgcccgtcggactcatacccgcagacggcggcgaacaggtcgccgggctgcgtggtgcgcgagtcaaagctgatatcccggatgtccagttccggatcggcggtgcattcgcacacgtccagaacggacagcagtcgcttgagtttcataaacgtacctccgttgttcgtcagtatcggcccagcatgcccgaatcgctggtcacgagcgtgacctccacgaccgtaccgtgatcgatctgggtgccggcggcgacgctctggccggagatgacctgcgccgcggtatccgtgatcgaactgctggtcttgatatacagccccagtgcggccatgcggtcgcgggctgtctgatagctgagattggacagatccggcatcgtctccttgtcggccgagggctctttgccggcgtagagcaggatggtgctgccgttggccacgaccgcgccgctgcccggaagctgcgccgtgattgtgctgccatcgccgtagatgcgcacctgcaggcccacctccgcgagcgcggccttcgcctgctcaacggacaggcccgtcacgttcggtacggtcttatccatatgcgtcttttccgtctcggagtacgacggctccacgccgaggtacggcaggatgtccgccatcattttgccgacgacgggcgcggccatctggccgccgctgatatagatgccggtgctgttgctcggcgtgtcgagcagcacgaggatgacgatctgcgggtcatccgccggcgcaaagccgatgaacgagacgatgtactccttcgcgccgccggccgcgtcctgcgcgaccttttccgacgtgccggtcttgccgccgatgcggtagccggcgacgtaggcgtttttgccggtgccgtcgacggggtcgccgacgacctgctcgaggatctggcgcacggtggcgctcgtctgctcgctcacgacctggcgcaccacggtcggcgaattggacacgaccgcttccccgtcgctgttgacaatgctcttgacgacgtacggcttcatgagatagccgccgttgacgcaggcgctgactgccgtgatgagctgcagcggcgtgatcgtaaacgtctggccgaaggaggccgccgcgagctgggagaggttctccgggtcgtagaacgtgttctggctccaccagatgctgccgctctcgccggacatgtcgatgccggtcttggcggtgaggttgctgtccacgttgctggtcaaattcaggaagccgaacgcctcggcgtacttgtagaaggtgcgtgcgccgatgagctggccgatctgcacgagcgccacgttgcacgagtgctggatggcctgcgtcaggttctgactgccgtggccggtcgttttccagcacttgagcggatcggtacggccgagtacgttcgtgctgccgccgcagtaaaacgacgaattttcattgaccacgccctcttcgagcgccatggccagcgtgatgatcttgaacgtcgagccgggctcgtaggtgtccgacagggccttgttgcgccactgcttcgtctgcgcggcggagagcatctcggccttcttgtcgggattcgtttcggcgtcgatgccctcctgatccttgtcgctgaccttctgatagtcgttcaggtcaaagttgccgagcgagaccatgccgagaatggcgccgctgttggggtccatggcgatggccgcggcgccattttgcacgtcgtagtcctcgaccgcctgctgcaggtgcttttcgaggtaatactggatcgtggcgtcgatggtcaggttcatgtcgtcgccctttgtctcatcgtagtagtcctcgtagttgacaaagagcatatccgtgccgcggttatccgtcgcgcggatgatgcgcccggcgctgccggtcagatagctgtcatagcgctgctccaggccgtagaggccgttgttgtcctgcccgacgaagccgatgacgtgcgcggccagattgccgtaggggtaatagcgcttcgtgtccggctcgatcttcacgccggtgaggttgttctccttcttgaacgcgcgcactttttccgacacttccggctcgaccttgcgcttgacgacctcataccagcggtcggtattcttcgtcatggccaggatcttatcataatcgacgtcgaggatctcggaaagttcgcgcgcgatcagctgcggatcttctttgttcttgacgatctcggccgggctgatgaagatcgtatcggccgaggcgttcatggccaggatcttgccgttcgtatcgtagatcgcgccgcgcgaggccgtgatctccgtcgtgcgcacctgctggtcgatcgccattttttcgtactcgtcatggtgtacgatcatgacattgaacagcttgatgccaaggacagcaaatgcaaggatgccgcacacaatcaaaaggaagcgtgtgcggcggagcatcatgatattcggtgttttggtacttgcacgaaaaggcacgcggttgtcccggcgcccggaagtttcattcgccatgtctgtctccttgttcctgcggggatagtactatcatacaggctggcttatcgaaaatattccaaaatggaagagaagaaatcgccgaggcggtcggcaaggctcagcggttcagccgcgttctggtcaaggaccaccgccgtgtccgtggcgtcgccgctgatataatagagctgatcgctgcgcggcttctgcatgccgagctcgtggatggcgtaatcctcgatctccgtgaggttgaacgcgctctcgtaatcaatgcgcaggcgcgtttgctgctcctgcagctgggtatactgattctccagcgccgagacctccgccgacgcctgcgagagctgcacgcgcgcgaccagcgacacgacgatcagcacggcggcaatggcaaagccgagcacggccagcggggcgatcgcctgcttgggggtgggaacggactccgggacgacggcctccgtcgtccggggagcgtgcggcatctcgaccggcgcactgtaccggtattcttcggcagccgtgctgtgcaggtcatacgccgcgttgccgtccatgggcgcggtattgcgttttttcgaagcaggagatgccatgatcggctcctttctcagacgcgctcggcaacgcgcagcttcgcgctgcgggcgcgcgggttacactccaattcttcctcgccgggcaggatcggcttgcgggagacgctgcgcagcgtctgcacaaagccgcaggtgcacaccggtgcctcgcgcgggcaggtgcagccgtgctcccgccgggcgatgccggtcttgacgatccggtcctcgagggaatgaaagctgatgacgcacagccgcccgccgacgcggagcttgtccggcgcggtgtccatcatctcgcgcaccgccgccagctcgtcgttcacggcgatgcggatcgcctgaaagctgcgcttggcgggatgctgcttttcgcgcagcgccgcgcccggcatggccgagcggatcacatcgaccagctccagcgtggtcgagatcggccgctgcgcccgggcgcgtacgatcgccccggcaatgcgaggcgcatagcgctcctcgccgtattcatacaaaatgcgtttgagctcattctccggccactcgttgacgacgttccacgcgctcaggccgctggtcgcgtccatgcgcatatcgagcggcgcgtcgtgcatatacgaaaagccgcgctgcgtctcgtcgagctgcggtgaggaaacgccgaggtcaaagagcatgccgtccacggcgtcgatgccgaggcggtcgagaatggcggccgtgtcgcggaagttgccgtgcacgagctgcacgcgttccccgaacggggccagccgcgcgccggcgcgcgcaatcgctgtctcgtcgcggtcgatgccgatgagcgttccgatcgtcaggcggccggcgatctgctcggagtggccgcccatgccgagcgtgccgtccacgtaaatgccgtcggggcggatgttcaggttgtcgatgcattcgtgcagcagcacggggatatgtccggcgtccatcagaaatccagctcctccatcacggcggcgatgttctccggcagcgcctcgagcgggcagatctcatcccagcgcgcgctatcccagaactccgcatggttgttgctgccgaccacggtgacgctcttggtcaggccggcgaattcacgcaggtgctgcggcaggaggatacgtccctgtccgtcgagatcgcagcgggccgcatacgcgaacagcgggcgcaccttgcgctgctgcagattggtcatggccgccgccttctcggagatcgccttccagttttcctgactgtaggccgacaggcacttttcgggcgagaccgtcacatagaacgtgtcgcccagttcttcacggagcttggccgggatgaacagacggcctttggcgtcaagcgtatgctgatagataccggtcatgctgcatccccccttctccgaaatcgtgcactttcgcgccccatgcgtgggcttttgatgctttttaaaccacttcgccccacgtgcaatcctcattatagtggcaggatggaaaaattgcaaggagaaattcccgcctttttcttgcaatttccgacaattctgtcaagccgactgtggtttttccggccacaagcatttgcgttccccgccgaaaaaaggaaaacggcggcacaagatgtgccgccgaagcgtgaaaaagtccccgccggaagcgcccaaagcgcgcccggcggggaaaaatttcggcaaaacgcaccaccgccgccggacataccggcggcggtgcggatgtgcaggaaaagcaggtcagttggtttcctcctcgggggcttcctcgccctcgaagcggatctccggctgtctggctgcaggggcagcggcgggcgcagccgtgctgccggcaacgttctggaacgcagcgtgcgcctgctgcacgctgccgagcgcggcggagatggcctcctccgtgcggcgcagcgcctcatcgcagaactggctcgaggcacggcgcagcgcgtcggccttggcctgcgtggaggcgagcatttcgttgctgcgggccttggcgatgcgcacgatctcctgatcgtccacgagcgcgcgggcgcgctcctccgcctgattgcggataccctcggcctcgcgcttggcgttgttgatgaattcgtcgcgggcagagaccagacgctttgcctcggaaagctccaccggcatggcggtcttgatctcatcgaggatctcgaggacctggtcgcgctcgacgatgcacttttcgttgccgagcggcacgccccatgcctccgacaccatggtataaagctggtcaatgagttccatgacttcgttgtccattttgtttcctcccaaagcgtgttccggcagtgccggtgaaaaagtcgatctgaaacgggtttattcgccgcgcgtcgcgcgttcgtgcacatcgtcaatgatctcgcacgggacgaacggcgtcagatccgcgccgtagcccgcgagctccttaacgaccgacgagctgaggaacgtatatttctgactggccgtcaggaacatggtgtccagctcgggattgatcttcttgttgatgagcgccatctgaaactcgttttcaaagtccgtgttcgcgcgcaggcccttgacgatcaccgcaccctccgggaaggtcttggcgtattcggcgagcaggccgtcgaacgtgtccacctccacattggggaagcggctgacgacgcggcgcgcgagcgccacgcgctcctcgcgggtaaacatggggtgcagcttgccggcgttgggcatgatgcacacgacgacgcggtcgaaaatgccggacgcgcggcggatgatgttcaggtggccgagggtaatggggtcaaagctgccggggtaaatcgctgttttcatgcgtggattccctttccgtagagcgtgagcttgatcttgccgtaattgcgctccgtgagcagatgatacggcgctcgaagctgcgggagcaccttttcgcggcggctctcacacacgattataccaccctcagctaatatgtcaaactgtacaacattttcaagtgctttgtcaagcaatcccgtatcatacggcggatcgaggaagatcaggtcaaattttccgcacgtgcgcaggtagccgagcgactcgccctgcaccacgtcgccctgcaggcggcagagtgcgagattggcgcgcacgagctgcacggcggcgcggctctcatcgacgaacacggcgctgcgcgcgccgcggctgagcgcctcgatgccgagctggcccgtgccggcaaagaggtcgagcacgcgccggccctcgatgtcgaactggatgaggttgaacatggattccttgacattatcggtcgtgggacgggtggccatcccctccggctcgcgcagcctgcggccgcgggccgtacctgtgatcacacgcatggcggttctcctttcgggtgatagtggtcgtagaccgcgcgggcagcacccgccggaacggccgcgcacagctcctcatacgaagccgcgcggatggcctttgtgctgcggaacgccttgagcagcgcgttgcgccgcttctcgcccacgccggggatctgatcgagctcggacgagaggctctcgcgccgcagccggcgctgatagtcgatggaaaagcggtgcgtctcctcctggatcgtgccgatgaaggcaaacaccgcggggttggcggaaatgccgatctcatgcccgccgggcgtgatgagcgcgcgcgtgcggtggcggtcgtccttgaccatgccgaacaccggcacggtcaggccgaagccgtcgagcaccgtctgtgcgaccgtcgcgtgctccgcgccgccgtcgatgagcagcagatccggcagcgggcaaaagcccggatcgccgtccacatagtgctgaaagcggcgcgtgaccgcctcgtgcatggcgccgtagtcgttctgcccgtccgtcgtgcggatgcggaacttccggtagtccgacttgcgcggccggccgtgctgaaacacggtcataccggcaacgatgccggtatcgccgaggttcgagatgtcaaatgcctcgatgcgctcgggcggcgcgtcgagctccagcgcacgctgaagccattcgagcgttttgaggctgcgctgcgccgcggtcgtcgcaatgaggatctcctcgcgcgcgttgttcgccgccatctccgtcaggcggcacttgtcgccgcgctgcggcacggcgagcgcgaccttgtgccccgccgcctcggtgagcagacgctcgagcgcttcctgcccctcgagcgcgcacggcagcagcacctgccgcggataggcgccgcgcccctcataatactgctgcacgagcgcggcaagcgcctcgccgtccggctccatcggctcgtcgagaaacgacttgtccttgccggtgaggttgccgtccgtaaagtgcagcacggtaaagcagcacttggccccgcgctgaaagccgacggcgtccgtgtcggagtaggccgtggcgatgacgcgctggtggttctgcaggccctggatggcacgcagccggtcgcgcagcgacgccgcgtattcaaaccgcagcgcatcggccgcggcctgcatctgctcggtcagttcggccgtgagctccgccgtgcggccgtcgaggatcatctcggcctcgcggatggccttgaggtactccgcgcgcgtgacgtccttcaggcagtagcccgcgcaggtgcccatgtggtaattcaggcacgggcgggcgcggccgatgtcgcgcggaaagcggcgcgtgcacgtcggtaggcgcagcgtcttgcatacggtgtcgatgatctcggccgtcatgctccggccgccgtaggggccgaagtacttcgcgccgtccttctccgtatgattgacgagcgagaacgtcgggtacggctgcgtcacgtccagacgcacgaagggatagcccttgtcgtccttgagcaggatgttgtatttgggtttgtgcagcttgatgagcgagttttcgagcacgagcgcttcgaactcggactgcacgacgatgacattgaaatccgcaacgtgcgcgaccatggccgccaccttcggcaggtgctcgccgcgaaaatagctcgtgacgcggtttttgagcgctttcgccttgccgatatagatgacctcgccgtgctcgtcgagcatgatgtacacgcccggcagcagcgggagcatattggccttttcgcgcagttggtcgggtcggagtttttccatagtctgctcctgcgatgccgaaaaaaatctgcggtcaggaaaacaggggcgtgctgatgacacgcccctgtttcggtttcatgttgttgggatcactcggaaaaatcggaattgatcagtgcggtcagggtatcgatcgcttcctgctcgtcggcgccgtcggccacgagggtgatcgtcgagcccttcacgatgccaagtgacaggacgccgagaaggctcttggcgttaacgcgtctctcgtctttctcaatccagatgctgctcttgaactcgtttgccttctggataaaaaagaccgcgggccgtgcatggagtccctccaggttgttgatgactgcttctttcgtgatcattttctccactccttatgcactattatgcttgtatcatcttatcaaaaacgcccggcatcgtcaaccgattttcgtttttttgttgctttgcacagcgttttttcgccgggtttttctgtttttatttcagttcgacaacggtcacgccgctctcgccctcgccgtaacggccgagccggtaggacttgacggccttgtttttgcgcagcgactgctgcacggctgcgcgcagcgcgccggtgcccttgccgtggatgatggtgaccttctcgagcttggccatgacggcgttgtcgaggaaacgctcggtcgcggcgacggcctccatcgtgtccatgccgcgcaggtcgatctccgactcggcggccacattgcgcaggctggctgcgtgcgcggcggcaaacttctgcgcctcgggcttctcgttttcgagcaggtacacgtcctgttccttggccgtcacgttcatgatgcccgcgcgcagggtcagcgtccggtcggcggagatggccgtgacggtcgccttgatgtcgcccatcttgcgcagctgcacggtgtcgcccacgcgcaccgggcgggcggagacttttttctcctgcacctgcgggtgcgccgcggcggcggccgcgtcctcggccacgttcagcttgcggcgcagggcggcgcgcgcgtcgttggcgcggtggtggtcggtgtccattttctccattttgcgcagcgcgtcgagctcgcgcatcacctcgtccgccgtgcggcgcgcgtcgccgatgatgcgctcggcgtcgcggcgggccttctcgtccgccttttccagccggacggagagctccgccttcaggcgctcggacttgcggcggttttcctccgcttcgcgcagctggcgcgccgcctcggcgcggtcgcgctccatgagctggcgcacctgctcaagcttctcgatggtggcctccatgctcgcgctctcggtgctgacacggctgcgcgcgtcgtcgatgatctcctgcggcaggcccagccgctcggagatggcaaaggcgttggacttgccggggatgccgatgagcaggtggtacgtcgggcgcagggagtccacgtcaaactcacacgaggcgttcatgacgccgggctgcgtcgtggcgtagaccttgagctcggtataatgcgtcgtggcggcgatgagcgcgccgcacttgcgcgcgtgctcgatgatggcgatggccagcgccgcgccctcggccgggtccgtgccggcgccgagctcgtcgaacagcagcagcgaccggtcgtcgcactccttgagcatgcgcacggtgttcgtcatgtgcgccgagaacgtggacagcgactgctcgatgctctgctcatcgccgatgtcggccatgatctcgtggaacaccggcatggtgctgccgtcggcacacgggatgtgcaggccgcactgcgtcatggccgcgagcagaccgatggtcttgagcgtgacggtcttgccgccggtgttcgggccggtgatgacgagcgtgtcaaattcgccgccgagcgaaacatcgatcggcacagcggtgtccttcggcagcagcggatggcgcgcgcggcgcagctgcaggtgcttgtccgtcagctccggcgcgatcgcgttgagctggtaggcgagctttgccttggcaaaaatgaggtcgaggcgcacgagcacgtcaaagtcgctcgagatgtcctcccggtgcgcggcgcactcggccgagagctcggcgaggatgcgctcgatctccgtcttttcacgtgcgcgcagctcccgcagctcgttgtttgccttcacggcggccatcggctcgatgaacagcgtcgcgccggaggccgacacgtcgtgcacgaggccgggcacggcgcccttgtgctcggccttgaccggcacgacatagcgctcggagcgcatggtgatgatcggctcctgcagcgccttggcatagctcggcgaggagatgatcttctgcagcgcatcgtgcacgcgcgcgctcgcggcgcggatcagccggcggatggacgccagctcgctcgacgcgctgtcggcgatctcgtcctcgccggtgatggaggtgaagatcttctcctccagaaagcggttggcctgcagggcgctgaagaggtagtcgatgctcgtcttgtcctgccgctcgccggtgccgtagctgcgcacgcagcgcgccgcctgcagcacgcccgcgatatccagtagctcgcgcgtgttgagcgcgccgcccatgtccgcgcgctgcagcgccgcgcgtacgtccttcacaccggaaaacgacgggctgcccttgacgaccatcatcgatgcggcggcgctcgtctcgccgaggcgggtcgccaccacggcgcggtcgccgctcggacgcagggccatggcctgcgtgcgggccgtttcgctcacggcctgcgcagccagcagcgccagcacggccggcagctccagcgtctgcagggatttttcataggaatccataggatgtctcctttgcgggggaaaaattcaagatcagatgcgcgcgacgccgctcgcgcgcgcggcctgcgcgaccgccgcggccacggccgggccgacgcgcgggtcaaaggccttggggatgatataatcggcgcacagctcctcgggcgtgatgagcgccgagagcgcgtgcgcggcggcgagcttcatgggttcgttgatatcggacgcgcgcacgtcgaacgcgccgcgaaagatacccgggaaggccagcacgttgttgatctggttcggatagtcgctgcggccggtgctgacgacggccgcgcccgcggccctggcctcgtcggggaagatctccggcgtggggttggcgcaggcaaaaacgatggcgtcgcggtgcatggtgcgcaccatgtcgccggtcagcaggccgggctgcgacacgccgatgaacacgtccgcgccgcggacgacatcggccagcgtgccggcctggcggcggaggttcgtgacctcggccatctcggttttgatccagttcatgttctccggccggccggcatagatcgcgcccacgcgatcacagagcgtcacgtcgcgcgcgcccgcgctcagcagcagcttgctgatggaaatggcggccgcgcccgcgccggacaggacgatcttcacatcctcgaggcgcttgccgaccacgcgcagcgcgtttgtgaggcccgcgagcgtgatgatggccgtgccgtgctggtcgtcgtgaaagaccggaatgtcgcacagctgcttgagcttgcgctcgatctcaaagcagcgcggcgcggagatgtcctccagattgatgccgccgaagctgccggagagcaggtacaccgtgcgcacgaactcgtccacatccttcgtgcggatgcacagcggaaaggcgtccacgtccgcaaacgccttgaacagcacgcacttgccctccatgacgggcatacccgcctctggcccgatgtcgccaaggccgagcacggccgaaccgtccgtgatgacggcgcagagattgtgccggcgcgtgagcgtgtagctcttgtccgggtcgcgctggatctccagacacggctgggccacgccgggcgtatatgcgagcgacaggtcgtcctttgtggagaccggcacgcgggtgttgacttcgatcttgccgccccactgctcgtgcagacggagcgattcctttgcgtaatccatgcttatgcctcctcctgtttcgggtgcaccatatcctcgggccgcacccaggcgtcaaactcctcggccgtgagcaggccgagctccaccgccgcggctttgagcgtctggccggtggcgtgggcgtgctttgcgatctttgccgcgttttcgtagccgatgtgcgggttgagcgccgtgacaagcatgagcgatgcgtccagatgcgcctgaatgacggcgtaattcggccggatgccgcgcacgcagttggcctcgaacgaatccatggcgtcagaaagcagacgcgccgactgcaggaagttatagattgtcaccggcaggaacacattgagctggaagttgccctgcgacgccgcgatgccgatggccgtgtcattgcccatgacctgcacggccaccatcgtgacggcctcgcactgcgtgggattgaccttgccgggcatgatggacgagccgggctcgttggccgggatgatgagctcgccgatgccgcagcgcgggccggaagcgagccagcgcacgtcgttggcgatcttcatgagatcggccgccagcgccttgagcgcgccgtgggcaaataccatctggtccttgctcgtgagcgcgtggaacttgttcggcgccgacaggaaggcgtagcccagcagctcggagatctcctccgccgccagatcgccgaacgccgccggggcgttgagccccgtgccgacggccgtgccgccgagggcaagctcactcagcgcacggcaggcctgcacgatcatgtcgcggtcgtggccgagcatggcgctccagccgctgatctcctgcccgagcgtgagcggcacggcgtcctgcaggtgcgtgcggccgatcttgaccacatcgcggtactccgcgctcaggcggtcgagcgtcgccgtcaggcggccgatggcgggcaggacctgctcctcgagcgcgacgcgcgcggccacgtgcatggccgtcggaaacgtgtcgttcgagctctgcgagcagttgacgtggtcgttcgggtgcacaagatcttcacccagcagctcattggcgcggtgggcaatgacctcgttgacattcatattcgtctgcgtgccgctgccggtctgccagacggcgagcgggaagttgccgtcgagcgagccgtcgaggatctcatggcaggcggtctcgatcgcaccagcgcggcgggcgtcgagcacaccgagctgcgcgttcgcgcgcgcggccgcgagcttcacgaccgcgaacgcgcggatgacctccggcgggatcttctcggtgccgatgcggaagttttcaaagctgcgctgcgtctgcgcgccccagtaacggtcagcaggcacacgcacctcgcccatggtatcatgctccagacggtattccatcctgtaacctcttttcgcaaaaatctcagatgccgctattatacgcccatctgcccgcgcaccgcaaccccggaaacacgcaaaaagcagcgccgtccgaagacggcgctgctgaaaactgtcggaaacccaagcggttttccgacaaagggcttgcagtctgctgcgcgcagaatttgtgtgccgccggcgcacaaatttcacacttgcagcctgagaagtattttttccgccgcacatatcgccggaaaagatgacaggatttcctttcgccgctccggcggcgaaactctgcgaggcttctccttatccggcgcttagcccgcgcggcgcagcacccagaggctctggatctgcccggcgagggtgtcatagtcccagctcttttgggagttcgtggggctgttcggatcgttgagcgtgatcttgtcgccgtcgcgcccggtcaggacgaggaagtgcccgtcggtcgtgaaatcgcctgggccgacgaccacgatgatcggattgccaacgtcgagattgcggtagatgcggtccttgtccagcgggatctgcgtcacgtccaggccgagcatccgcccgccctcggagatgagcgcccacttgctgccgctgccgggcacgttgaactggtgcgcttccgcgaactggcacatccagagcgggtccttcgtcgtgtcgccggtgaggtagatcgtgaccatggacaggcacgtcggcccgcagccggccaggccgatgatgctctcgttgtattcgcggtagccccagcgctcgtcccactgcagcagcagcggcacggtctccgacccggcaaggccgctgaggtcgatcgtcggggtcagatcttttttcttcgggtagtcgcgcacgaaatcgcgcgcgtcgggattgcgggcatagagctgcacgagcgcgtccggataatcatcgagcgaggcatcatttttctcggcatagctgtccagctcgcgctgcgcgcgctcggccgtcgtcttgccgctcgtgaacagaccgcgcgcaaacacgccgaagacgatcagcgccagcagcaccacaatgacaagcagccgtcggcggccgcgttttcttgtctttcgggacatggcagagttcctttccgaatggatgctcctgattatacacgattctgggccgaaaatctcgaaaaatttctgaaatcttttttaaacgcaaaacggccggacgctctgagcgtccggccgggaggatccgggtgattcagttggccgtctcgccggacgtgctctgcgtctggcggaacacatcggtgaaggcctgatacgcgccgttgttgctcatcggcgtgaggtacatgagcccgttttccagcgtgcagcggaacatctgcaccgtgccgttttcgagcgcgagcgtcaggttgtcgccgttgagcgcaaactcgaaagccagcggcgtgccgttggcatccgtgtaagtacccgtgccgttggtgcggaacgtcagctcgcggatcgtgccgggctccttgacgtccgtggtctccttggcgccggtgtccgtgctgggcaggatctggctggcgctgccctcatccgtcttcttgtcggcgtccgtgcgctcaaaagtccacgtgccggccaggatcttgttgacggcgctgtcgccagtctggatgccggacataatatctgcagtggccgtcggcgtcgcctccggggcggcggtcgcctgcgcctcgacgccgcggccggtgcagccggcgatcagaagcgtgcagaacagaaaaattgcggtcgtaagaagctgaaaacgtttcatcagaacaatctcctttccggtgcactggcgatgccggccttgaccggcgccgcagcggtatcgggctgccgctccacgaccacaaacatggccaccatgagcagcgcattcggcatcgggcagaacatgcccggattcgtcatggaaatgagcagcatggcaaagtaggacagcgcgaacgccagcgtcatgcggctgcgcttgcgccagagcaggcgcacgcggtcataaaacagccagccatagccgaccgcgccgacaagccccatactgccgaggatctgcgcgatgaggttgtggtaccagacgatgctgccctccacgccgaggaagatcggcgcattgtgcatcgagccaagaccgcagccaaagagcggattcttcacaaagtccagcaggccctggatgaaaaacgtgtaccggctgtcatccggggagatgagcgcaccgtcgaccatgcgcgaggcgaacagccgcggcacgagcgcgatgagcagcgcgaccgccgggatcaggctgatgagcccgacgcggcgatagaccgcgcggcgctcgggattgcagtaatacacataggcaaggcacagcagcagcattgccgtaccgaagatcaggccgctgcgcgagccggtcatgagcatcatgaagtacaaaaacgcgaccgcgaggaagtgccgccggtcacgcgcggcaaagtacgacacggcgggcagcgagatgagcagcatcgtcgcgctgaaattgcggtacttgaaatagatcgtggaaaagtcctgcacgaactcctgcatatggcgcgcataaaacagcgccaccacaaagcctgtgaacagaccgccggcataaaggatctgcagcatccgctcggcgacgtcatagtcgcgcgtgcggtccgcctcgctgcggcacagcaggtagaccagcagcatcacaacgccgaggccgagagaatagtacagcgccgtgggcgcgaaatactcctcgcgggagatgaagcccaggccgccgagcagcgttgcgaccgacacggccaccatgccgtgcaggcagccgccgttgcgcggcgcgcgggcgtaagcaccgatgtgcacgagcagcgccgccgctgccagcaggccgatccaccagaagcgaagcaggctgtagagctcatcgtaaaactccgtgcccaccatggccagcagcacgaccgggaacaggacgctcagcagatcgtcgcaaaacagcagcaggaagatcagcgtggacatgacgagaacgccgcccacgaccggcagtccggccgccatgaacaccgcgagcatcagaaagcagaccgggaaatacagcttgctgtgccagaaccggtcagccacgctctgacaggcggcgatcagcgccgacgcgccgccgacgcgctcatcaagaaacgcgcacacgcggtcaaacatccgcgcgaacccatggccgcgccccgcctgctccgtattcgattggacaggtttatcaaaagcattcataagcatcaaaaatcgtccggaaagctccgccggggcaccccggcgcgggaagaaaaaaggatttgtgtaaccggctgataccagcctaaatcttcccatctttcattcgcggatgcattatagcgcgccgcctgccggaagtcaatacttaaaacagatttaacatttccgaaatcttttcgcgtgtgtttttgatgtatattactatatattctccgcgcattttgtcgtatttgcacaacaaagccgcagtttcccaaaaactgcggcttcctaattgccgaacattttaagaactcggggcgcgaaaatgttacaaaatcatgacgaagtcatctcacgcctgcggaaaatgccccgttttgcgcagcgcacgcacgagatacatggcggccacgccggtgaacgccccggtgatcacgctcgccgcgacgagcgcgggcgcatacaccagaatggacggcgtgcccgtgacccagacggcgaccagcagctgccctgcgttgtgcccgaaggccgccagcacgctcacgacccacagcagccgctccggcaggcggcggatggtcaggcacatgacgagataggcgagcacgccgcccgcgatgctgaagagcatcgccgatacgccgccggtgaacacgctgccgagcacgatgcgcacgagcaggatctcccccgcctgccgtcggccgagcagggccatggcaatgagcgtgacgatgttggcaaggccgagcttcacgcccgggatcggcacgacgggcgggatctgcgcctcggcgacgaagatcgtcagcgcgatggcggtgaacatggccagaacggccagacgcttcgtccccttcatggcgacccctcgatctgcaccgtcaggtggtgcggcacgcaggcgatcgggatggccgacgtagtgatcttcccctgctggacgcacaggtggtccgggcagtcggcatatgtgacggacacgccgtccgactcgacgtgcacggtgttcgtgccccagtcggtctgcacttcgatatcatatggtatggtcacggcgcgcaggtcgatgcgctgatagacctcgccgtcgatgcggatgacggccgtctgccccgtctgcccatggccgcgcagcagcaaaaatgcgccgccgcccaaaatggcgagcgcggcgaacaaaaggacccaaaatttcgtctgtttcatcataggttcattgtaggatgcccggcagtggttgtcaatggatttttgccgtggtataatggtttgatttttcatcgctgtattataaatgtaccgctccccgcgcgggagcttcggaaaggaggcggacgccgtgtctgccgtaactgcctatgccgcgcaggccgcgcacttcattctgccggtcatcgcgctcatcgtgctcatccgctgtgtcgcgtccatgttctacggccgcgccgagccggagacctggggtcatctcgtcacgccggacggcaaggtctatcccctgctgcactgggagtgcctgatcggccgcgcccgcagcgcggacatcacgctgccctatcccgacgtggccaacgtccacgccgtactcatgcgcaacgacgccggcgagtggaccgtcagtgacctgagccgcagcggcggcgtgtacctcaacggcgaacagatcaccgagccgacgcaggtgttcagcggcgacattctccgctgctcgacgcacatgctcaagttcgccgacatgagcgaagagcgccgcgccgtgcaggagcagcgccgcacgatcgccggacggaaggtctccgccggcggcacgctgtttttcctgacggtgtttcagctgctgctggcgctggagttcgtgtcctcggccgacagcgcgcacctgctgggcattctgatgtcgtttgcagccctcgcgctcacgcagtggttctgctacgtgctcatgcgcacgatggaccgctcgggcttcgaggtcgagacgatcgcgtttttcctgtgcacgctcgggctcgagatctgcgcgacgagcacgccggacgatctgaccaaggagatcatcctcatcatcgtgggcatcgcgctgtttttcctgctcggctggtggctgcgcgacctgagccatgtcaaggcgctgcgctggccggcggccatcatctcgctggcactgctggcgctgaacctgttcgccgcgcgcgaggtgttcggcgcgaaaaactggctgacgatcgcgggcttttccctgcagccgtcggagctgatcaaggtcgcgttcatctacgtcggcgcaacgtcgatcaaccggatgttccgcagcaagagcatcctgctgttcatcgccttttccgccatctgcgtgggcgggctggcgctgatgggcgactttggctctgcgctcatcttctttgcgactttcctcgtcatcgccttcatgcgctcgggcagcattgcgaccgtgctgctggccgtggcgtccgccgccatggcgggtacgctggtgctgagcatcaagccgcacgtggcgcagcgcttcgccacctgggggcacgtgtgggaggacgtctctggcgcgggcttccagcaaacgcgcgcgctgagcgcggccgcctccggcggtctgttcgggcagggcgcaggctgcggctggctgaaaaatatctttgctgccaacaccgacatggtgttcggcatgctgtgcgaggagctcggcctgatcgtggcgctgtgcgcgatgctggccatcatcgccctcgccatcttcaccgtcaagaatgcggcccagggccgctcgtcgtactacgtcatcgccggctgcgccaccgtgacgctcatgctcgtgcagatgtcgctcaacgtgttcggcgtgctcgatatcctgccgttcacgggcgtgacgttcccgttcgtgtccaagggcgggtcgagcatgctctcgtgctggatgctgctggcctatatcaaggcggcagacacccgacgcggtgcgagcttcgtggtgcggctgccatcgcgcaataaaaaggaggcgcaggcatgaacaaagtcaaacgccgcgccatgagcgcgctgctcgtcgccgtgctggtgctcggcggcatcggcgtgtacatcgtgcgctacatcgaacacggcgccgagtgggcgaccttcgccgccaacagcagcgtctacaccagcggtgtgctcagcaccggcacgctcaccgaccgcagcggcgtcgtgctcgcaacggccaacggcggctcgcgcagctacgccgatgacgccgccgtgcgcacggcctgctatcaggccgtcggcgactacaccggcaacgtcggcactggcgcgctcaaggcattttccaagcagctgtcgggctacaaccccatcaccggcacctacgccaccgacgggcacaccgtcgcgctcacgctcgattcgagcctgtgcgtgaccgcctatgaggcgctcgccgggcgcaagggtgcggtgcttgtgagcaactacaagaccggcgagatcctgtgcatggcctccggcccgagcatcgaccccagcagcgacggcgacgtgccggacggcgcatacatcaaccgctgcatcaacggctcgttcacgccgggctccatcttcaaactcatcacctccgccgccgcgatcgagaacatcaaggacatcgacagccgccgctttacgtgcgcgggcagcgtcgatgtggcgggcgtgaccgtcaagtgcacgggcgtgcacggcagccagacgtttgaggacgcgctggcaaactcctgcaactgcgcgttcgcgcagatctcgctcgagctaggggcggacaccatcgagagctacgccaagaagttcggcttcctcgattcccagtcgctgagcggcatcccgacgatggccggcagcttcaccaagggtgcgtccggcagcgcaaatctcgcctggtcgggcatcggccagtatgaggacctcatctgcccgtactccatgctgcgctatgtctcggccatcgccaacggcggcagcgtcgtggaaccatcgctgctgctcgacacacccagcggctcgaccacgagcctgctgagcaccgcgaccgccaacaagctgcgcgacatgatgaactacaacgtctcggcccactacggcacgaaccgcttcccgggcctgaacctctgcgccaagaccggcaccgccgaggtgggtgacggcacgtcgcacgcctggttcacgggctttttgctcgacgatgcgcacccgtacgccttcgtcgtgctggtggagaacgccggcggcggcctgacgaatgcgggcgctgtggccaacaccgtgctgcaggcggccgtgaacaagtaatttaggagtcacacatgatcgatctatccgtccgtgggctcgtcaagggctttgagcagggcaacgatatattaaaaggtatcacattcgacgtcaacgccggcgagcgcgtgggtatcctcgggcgcaacggctgcggcaagacgacgtttttccgcatcctctcgggcgagctgcagccggacgccggcaccgtgtccatcgcctccgggcggcggctggggctgatctcgcagatccccgtctaccctgacggctggacaacggaggacgtgctacgcgaggcgcaccggcggctctacgatatggaagctcgcatgaacgagctcaccgcgcgcatggcgacggacgactcccccgccctgctctcggagtacgaccgcctgtcggaaaatttccgccgtctcggtgggtacgacatggagcacgagcgcaaccgcgtcgccaacggtctggacatcccggccgcgatgcgcgcgcagccgttcgacagtctctccggcggggagaaaacgcgcgtgaacctcgcgcggctcatcctcgaggacacggacattctcctgctcgacgagccgacgaaccacctcgacctgcgcgcgaccgagtggctggaggcgtacctgctgcattttcgcggcacggtgctcgtcatcagccacgaccggtattttctcgaccgcgtcgtgcagcgctcgatcgactttacgtccgggcaggcggagttttacagcggcaactacagcttttacgtcgtcgagcggcagcgccgctttgacgagcagctcaaaaaatacgagaaagatcaggccaagctccagcagctcacggaggcggcggccaagctgcacctctgggccttcatgggcaacgacaagctgcacaagcgcgcgttttccatcgaaaagcgcatggaaaagctcgaaacgaccgagcggccgaccgaggcacgcaagctcaacgtgcacttcacggcgcaggaattccgcggtgacgacgtgctgaccatgtcgggtctgggcaagcgctacggcgagcggacgctctttcacgacctcgacctgaccgtgaccggcggcgagcgcatcgccctcatcggcgacaacggcgccggcaagacgacgtttctgcggctcgtcatgaacgaagagacgccggatatcggctgggtgcagcgcgggccgtccgtgcgcacggcatacctgccgcagatcgtccgctttgccgtgccggagcgctccatgctcgacacgatgctctacgagtgcaagtgcacgccgcaggaggcgcgcgaccagctcggcgcctacggcttttgcggcgaggatgtgctcaagcccgtgtcggcgctctcgggcggcgagctgtcccggctgcggctgtgcatgctcatgcgccgggaaatcaatttcctcatcctcgacgagccgacgaaccatctcgacatcgccagccgcgagtggatcgaggacgcgctgagcgactatacacaggcgctgctgttcgtatcgcacgaccggtacttcatcgagaaattcgccacccgcatctggctgcttgaaaacggcacgatcacggactaccgcgggacgtatgagcaattccgcgaataccgcgcgcgccagaccgccctgcagcagacggccaaggccgtcgagcgcaaaaaagagccgaagccaaagccgaagcgcgccccgaacaccacgcgagcgcgcgagcgcacggagcgcgagatcgaaaagctggaggggcagctcgcggcgctcgacgccgagagcgaggccaacgccacggactatcagaaactcatggagatcgatgcgcgaaagcaggcgctcaatgcgcagctcgaggcgctctacgaggcgtgggaggcgctgtgcgaatgaaacacaaaacatctctgattgccgccatcgtgctcgtcatcgccggctgcgtgctgcgttttgcgatgccggggcacgactttctgggctacacgctctggggcatcgccgtgctggtatttctattcccacggctgcaccgcgtggggcgcatcgtgctgggcgtgctcgtgtgcgcaggggtgatcgtgttcgcggtctttgagatccccgtcgtgcgcgacgcgcgcacggacacggacgcgcacccggacgcgatcatcgtgctcggcgcgggcgtcaacggcagcacaccgtcgctgtcgatgtgcaaccggctcgacgccgcactcgcgtatctgggcgcgaacccggacgcgctggccgtcgtctccggcggccagggcgagggcgaggacatcacagaggccaaagccatggccgactacctcacggcgcacggcatcgacagcgcgcgcatcgtgcaggaggatcagtcgcgcaccacgcgcgagaacctggaaaattcgttcgccatcctccgtgcgcgggggtacgacccggcgaacggcgtcggcatcgtgacgagcgaataccacctctaccgcgccaaacgcatggtgcgggcactgggcgcagagcccgtcggcatcgctgccgagacgacgctgccgaccatgcgcgtcaattacttcatccgggaggcctttgccgccgcgtatatgcagctggccggcaccctgtactgagaggtgccctatggaaaaagtcaacgtatacgactgggacaagaccatcttccccgtggacagcacagtggcgttcgtgcgctggtgtctgcggcggcatcccggtgtgatccgggcgcttttgggcacgctggtcctgctgccgggctactggctcggcaaggtgagcaagacggccatcaaggagcggatgtacggctttctgcgccgcgtgcccgatgtggacgcggagctggaggcgttctgggcgcagaattttgcgcgcgtaaacccgtggtatcttgcgcagcagcgaccggacgacatcattatctccgcctcgccggagtttctcgtgcgcattccggcgcagaagctcggcgtgcggctgctggcctcgcgcgtggataaacacaccggcaagaccgacggcgaaaactgccacggtgcggaaaaggtccgccgcctgcacgaggcttatcccaacgtcgagatcgcggagttttactccgattcccgcagcgacagcccgctcgcggagctggccgagcacgcctacctcgtgcacgggcagacccgcacgccctggtaagggcagaaaggagaacgcctatgtattccgcatccgattaccgcggcatggcccgccgcgcgctgaaaaattactggtggctcgccgtcggcgtgacgctgctggcgagcatcctcggcgggacgagcagcagcttcaccccgtcatttagcctcaccatcaacggggacgacctgacgcagtactatcccgaggccctgcgccacgcgctgcaggtgtttctccccgtgtccggagtgatctcgctggtgcagttcgtcatcggcggcagcgtctccatcggccacaaccgcttctgcctgaagctggtcgacggcgagcaggcacagtttgaggatctgttttccggctttgacatcttcggcaacgccttcgtgctcaacctgctcatcacgctcaaggtgatcgcatggtcgctgctgtttgtcattcccggcatcgtcgccgcctaccgctactccatggcgacgtacatcatggccgaaaatccgggcatgcaggccacggaggccatcgagcgctccaaggcgctcatggacgggcgcaagggcgacctgttctgccttgacctgagctttatcggctgggcgctgctagccacgctgaccgccggcatcggctatctctggctcacgccgtatatgaccgtgtcgcgcgccgcgttctaccgcagcctgccgcgcagcatgggcgaccgtgcccccaacggctggcagccgaaccctggcccgcagccgggcggcgactggtacagccagaactgaacacaaaaacatatccccggcagcatggctgccggggatatctgcatcttcagacaaaatagcccgcattctcccgcaccgggcaggacgcgaaaagctggcgcaccgcgctctcgtactctatcatgtcctgcgccttgcggatgcggcgcagcggccgctcggcatccgcgaagctgcagccgagatagcgccacgcctccttcatgcgaaacagcagcgcgcgccggtcgggaatgcgcgcgctcgtggccgcatagagccggtcatgaaacgcctgaaactgcgccgccgtcggctcgacacccgtgcgcagctggccgataaggccggggttggcggccagcccgcggccgagcatgatgcgctccaccgtcggaaagcgcgcctgaaacgcgcgcacggccggagcgtcgaacaaatcgccgttgtagcacaccggggcgcggctgtgcgcgagcgcgtaggcaaacatgtcgagatccgggtggccgtgatactggtcggcctgcacgcgcgggtgcacgatcagctcgcagatcgggtagtcattatacagctccagcagcgcggggaatgtctccgccgtcgtcttgccgagccgcgtcttgaccgacaccggcagcggacaggcggcaaacacggcgtcgaaaaaccgccgcagcagatccggctccgtgagcagacctgcgccctttttcttcaccgtgacggtgttcgacgggcagccgaggttgaagttcacctcgtcgtagcccatatcagcgagctgccccgccatccagagaaagtcctcggcgcagtggcccatgagctgcggcacgacacggatgcccgcgttgtgcgcaggctcgatctcgcgcagctcgcgcggggaaaacgtgcggttcgccgtcggcgagagaaacggcgtatagtagctgtccgccgcggggaacgtctgccgctgcgcctgccggaacaggtcaccggtcacgccctccatcggcgcgcagagatactgcatggtcatcacctcatcatccggcccatgatagcggaaaatccaccccgcgtcaagctttacaaacccgccgccgtcaggtatgataaagggtacacgcatccaagggaggggttatatgggatatcaaagcgatctggagatcgcccagcgctgcacgatgcagccgatctgtgacattgcacgcaccgtcggcatcgacgatgctgatatagagccgtatggccgccataaggcgaaggtggccctgtccgtgctcgggcagccgccgcgcggaaaaggcaaactgatcctcgtcacggccatcacgcccacgcccgccggcgagggcaagacgaccacgaccatcggtctggccgacgcgctgcgccgcatcgggaaggacgcggccgttgcgctgcgcgagccgtcgctcggcccggtgttcgggcgcaagggcggcgcaaccggcggcggctacgcgcagatcgtgccgatggaggacatcgacctgcacttcaccggcgactttcacgccatcggcgctgcgaacaacctgctcgccgccatgctcgacaaccacatccagcagggcaacgccctcggcatcgacccgcggcgcatcacgtggcggcgctgcgtggacatgaacgaccgacagctgcgctgcatcgtcggcgggctcggcggcagggccaacggcgtgccgcacgaggacggctttgacatcacggccgccagtgagatcatggccgtactctgcctggcagagtccatgcccgatctgaaggcgcggctgggccgcatcatcgtgggctacacgtatgacggccggcccgtcacggcgcgcgacctcaaggccgtgggcgcgatggcagcactgctgcgcgacgcgctcaagcccaacctcgtgcagacgctcgagggcacgccggcgttcgtgcatggcgggccgtttgccaacatcgcgcacgggtgcaacagcgtgctcgccacgcgcatggccatgcaccgctgcgactacgccgtgacggaggccggcttcggcgcggatctcggcgcggagaagtttctggacatcaagtgccggctcgccggactgcggccggacgccgccgtcgtggtggcgacggtgcgcgcactgaaaatgcacggcggtctggcgctgaatgaactcggcacggaggatctcgacgcgctgcgccgcggcgtgccgaacctgctgcaccatgtgcgctgcatccgcgacacgttcggcctgccatgcgtcgtggccatcaaccgcttccccaccgacaccgaccgcgagatcgcactgctgacggagctgtgcggggagctgggcgtccgcgtcgtgctgtccaccgtctgggccgacggcggccgcggcggcgaggcgctcgcgcgcgaggtcgtgcgcctgtgcgaaacggagaaccgtttccgctttgcctacgagctcgacgcaccggtcgaggaaaagatcacggctgtcgtgcgccgggtctacggcggcgcgggcgcggagatcctgcccgccgcgcgcagacagatccgcgagctggaggcgctcggcttcggcggcctgccggtgtgcatcgccaagacgcaggcgagcctgtcggacgaccctacgctgctcggcgcgcccgcgggcttcaccgtgaccgtgcgcagcgtgaccgtgtccgccggggcgggctttctcgtcgcgctcacgggcgacgtgctcacgatgcccggcctgccgaaagtcccggccgccgaaaacatcgacgtcgatgacgacggccgcatcactggcctgttttgagcgttttcgcccgcacaccgtttcgtgtgcgggcgttttttctgcgcatgggcaaaagttatgtaaaccaatcggcgcataccgcgcaccccctgctcataggatagtggcagaaagccggaggtggtgcaatgtacaaagtgcggcaagccgtcagaaaacaccggaaactgctgagcgtgtgcgcaatggtgctggccatcgcgctcatgttctgggcggtcaacagccccgcgatcgtgggcgtgagcgcggccaagcgcgtgctgcccatctacagcgtgcagcgcgacgaccgcgtcgtgagtctgtcattcgacgcggcctggggcaacgaggacacgcagatgctcatcgacatcctcaacaagtacaacgtccacgcgaccttcttcgtcgtgggcgaatgggtggacaaatatccggagtcggtcaaggcactcgcggacgcgggcaacgaggtcatgaaccactcgtccacgcacccgcacatggcgcagctgagcgccgagcagatccagacggaggtcaacacctgcgccgataaaattgaggccgtcaccggtgcgcggccgacgctgtttcgctgtccctacggggagtacaacgacacggttgtgagcaccatcaacggcctgggcatgcacgtcatccagtgggacgtcgattccctcgactggaagggcctgagcagcgacgagatcacctcgcgcgtgctcacgcgcgtgcagccgggcagcatcgtgctgttccacaacgcggccgagcacacgccggaggcactggccgggatcattgaggcgctcatcgccgacgggtattccatcatcccgatctcgaagatgatcctccccggcgacacgagcatcgaccccaacggccgccagtgcccggcggccgcggacgagggcgcatagggcgcgcagggaaagcggggcatgatccccgctttcgttgcattttgcgcgcgaaaacgttataatggagaaaaaatcaccgcccacggggcggtttgggagtaatatctatggaaaatttccagaaaatcgccgtgctcatcgacgcggacaacacgcagctgtccaagctggaggccgtgctgcacgaggtgtcggcctacggccgcatcgtcgtgaaaaaagcctacggcaactggcgcaaggactcgctgaaaaactgggagccggagctcaagcgcctcgccatccgcgccgagcagcagtttgactacgttgccggcaaaaacacgaccgacatcgccatggtcatcggagccatggatctgctgcacaacaatatgtatgacgcgctcgtgctcgtgtcgagcgacagcgacttcacgccgctggccatccgtctgcgtgagtcgggcctgtacatcatcggcgccggcgtgacaacgacgccggagtcgttcaaaaatgcgtgcgacgacttcatcctcatcgactacctgtccaaggcggacgaaaagccggcagccgccgagcgcgccgcggagcccgcggccaaaaagcccgcccgcaagacgaaaaagaccacccgcagcacgaaaaagcccgctgccgaagccgcgccttccgccgagccggagccgacgccggaacccgaacccgagccggaaccgaaaaagcccaatatcggcgagatccacaacctgctgcacatcgcgtccgagaagtatcaggacgccgacggctttgtcaacgtcagctcctcggggctgtacatcaagcgcgtcaagcccgatttcaacgtacgcgcctacggctacagcaagctgccggagctgctggccgccttcccgaacaagtatcagatcaagcgctatgagggcaagggcggcgcgacgatcatcgcctataaatgcctgtaatatcaagcattgaaaagtctgataaggacccgctcagatttgcgaaaagcccttgacttttgctcccgagcgcgctaaaattcctctcctgttggggaaggacaccaccgcgaagcaaccctctttcttcgatgcctctgcgtcggcactccccgcaaatttcaagcaagaaagaaggtctttccatgactgctcaaatccttgcagctgtcatcttcgtcggcatgtttgcgctcatcatcatggacaaattcgagcgccagtatgtcacccttggcagtgcagccctcgtgctcgtggtcgtgttcggcatctgcatgcacagctgggacgcgatcaaaaatgctctgaacctcggtgcgatcttccgcgccgacttctggtacggcgcttcggagagcgcaagctccggcgtcaactggtcgaccatcttcttcatcaccggtatgatgatcatggtcgagggccttggcaaatccggcttcttccgctggctgtgcctgtcgctggcaaagctcgcgcactaccacgtcgtgccgctgctgctgtgcttcatggccatgtccgcgtttctggccatgttcatcgacagcatcacggtcgtgctgtttcttgcgaccgtcacgctggagctggcacagatcctgtgctttgaccctgtcccgatgatcctgtcggaagtcttctgcgccaacctcggcggcgctgccaccatgtgcggcgatccccccaacatcatcatcggcaccgcgctcggctataccttcacggacttcattaaaaacaccggcgtcatcatcggcatctgctttgtgttcgtgctgatcttcttctggctgtgcttccgcaagccgctcaaggcgagcgaggccgcccgcccggccgacgccgtctgccccgctccggcgaccgccatcgccaaccgcaaggcgttcgtcgcggatgtgatcgtgtttctcatcgcggtcgcgctgctcgtgacgcacgcacagaccggcctgaccgtctcgtgcatcggcgtcatcgtcgcgtgcctgacgctgctcgtgaccgtgtttaccaacggcggcgctgcggtcaaggaagtcctccgcggtgtggactacaagacgctgctgtttttcatcggcctgttcatctccgttgcgggcctggagcagaccggcgtgctcaagctcatcgcgcagttcatctcgaatatcagcggcggcagcatcaaggtcgtcatcctcatcattctgctgctgtcggccgtgtgcagcgcactgatcgacaacattccgttcgcggccaccatggtcccggtcgtgcagtccatcgcggcgacgcagggcatggatctgtccgtgctcgcctgggcgctgtcgctcggcaccgacctcggcggcaacgccacgcccatcggcgcatcggccaacgtcgtggccacgtccgtgtcggccaagagtggtcaccccatcagctggggcaaatactgcaaatactgcgtcccggccaccgtgctggtcattgcggtctcgctgggatgcctgttcctgagatacctgtaattttacatcagaaaggcggtaacgcatcatgaagcaaatcatcgtgaccgtcggccgtgaacacggcagcggcggcaagtacatcgccgaacagatcgccaaacagctcggcatcgcgttttatgataaggagctgctgctggccagtgtcttcaacgccgaggacgccgcgcgctatgacgagaagccggtgcacctgctgtggtcgcgccgcatcggcgagaacttcaacgcgccggaggatgcactcgcacacgagacgttcgactacattcagaagctggcggacagcggcgagtcgttcgtcgtgctcggccgctgctcggacttcatcctgcgcagcaatccgaacgccgtgcacctgttcatcgccggcaagcccgaccagaagcgtcagcggctcatggaggaaaaatccctcacggccgatcaggcggcgctggaaatacgccgcgtcgaccgcgaccgcaaggcctaccacaactactactgcgacacgaagtggggcgacgcgcgcggctatgacctcgtcgtcaacagcggcaagctcggcatcgagaaaaccgttgacacgctcgtgacctatgtgcgtgcctatcaggcgcagaacgaataagcatgaaaatgccccggatgcattggcacccggggcattttctgtttttcatccgccggttttctgcggccagcaggacacgacgatccctgccaggatcagcgcgccgccgagctggcccacaatgccgaagtgctcgtgaaagcacaccgcgcccagcgctgccgcaacgaagggattgagcgcgcaaaacagcgccgcgtggtccgccgtcgtcccgctctgcgcgaccggctggagcgtgaagccaaagccgctgcacacgagcgccagcgccagcacgaccagccactccgtgccgctgccgggcaggtgcggcgtctcgaacagaaacgacgcgatcagcgccagcgcgcccagaaaccccacctgcaccacgccggacagcagggggtccgctccggcgtgcgtgagccggtcggtcacgaggatggccgtcgaatacaaaaacgcctccagaatgcagtacccgacgcccggcgtgagcgtgagaccgccgcgcagcgtcagcagtgccatgcccagcaggcacgccagcgcgccgaacagcacacggcgctccagccagcggcggctgagcgccgcctgaatgagcggcacgatgacgacggccgtgttcgtcacgaacgacacggtagaggtctccacggttttcagtgccgtgagctccgccgtcatgacgcaaaaatagatgctgcccatggcaagatcgctcagcagcgtgcgccggtcgatctgcagcagccgccgccggaacagcgccgccagaaatgcaaacgccaacaaaaaccgcaccgccagcagcgtgaatttgcccatgtcctacaagccgacttttgtgagcacatatgatgtgctgcgcgcaatgatgaccgccgccagcagcagctccgcctgcgtgcgcgtcatggtccgggtcttcatccgtattcctcccgaaaatgtcttgacgaaacgataccacggttatatcattgcgtaaagagacaatgtttcaacggttccttgcggaatctgcaaggacagaggcagcttatggacacggaaaaatgccgcgcactgctggccgtgctcgaggccgggagcctctcggcggcggcggaaaaactggactataccccctccggcctgagccggatgatggcggcgctcgagcaggagctgggcttcccactgctgagccgctcgcacagcggcgtgcagccgacgcgcgcctgccggacgctgctgccgacgctgcgggagctgacgcactggagcggtctgctcgacgcgcaggcagccgagatccgcggcgtcgagaccggcacgatcgccgtcggctgcgtctacggggcgtactacggctggctcagccgctgcatcgcccgcttttgcgaagtttaccccggcatcgaggtgcaggtcctgcagggcaacagcagccagctcacgcgcgccgtgtgcgagcacacggccgacttctgcatcacgagcttccgcgagggcgactttgactggatcccgctgtacgccgaccccatggtcgcgtggctgccgccggagcacccgctggccggaggcaggacgttcccgctcgcggcgtttgcgaccgagccgaccattgcgacctatatgcaccaggacacggacaacgcgcgcgtgttcgcccacgcgggcatcacgccgaacgtccgctacacgactgtggacagccgcgccacctttgccatggtgcaggccggtctcggcgtgagcctgaacaaccaactcatcacccgcggctgggacacgaccggcatcgtgatcctcccggtcgatccgccgcagtatgccgagatcggcatcgccgcgcccgcgccggaggagctgtccccggcggcgaagcggtttctcgcctttgcccggcagaccctgcgcacggaccccgaggccgcggaacttggaaaggagcaagcatgaaagtatccgaactcccctaccggcgcgtgacgcgcgaggaaatgaccgagggcctgcagcgcgtgatcgagcgcgtaaaggcagcgcagagcgtcgaggaaattctcgccgcgcgggcggaatatctctcgctcacgacggagtacgccacggcgcagtcgctgtcgtacatgcgctacacgatcaacaccgtagacccgttttatctggcggaaaaggactactacgacgagatcggcccggaggtcgaaaatctcgcgctgcagtacacctccgccgtgctcgacagcccgtttcgaaaagaactcgagacggcgctctcgccgatcctgctgcgcagcatggagctgcagcggcggagcatgtcgccggagatcatcgacgacatggtcgaggagaacaagctcgtgagcgaatacgcccagctcatggcgggcatgctcttccccttccggggcgagcagctgccgcggccgatgctgatgaaatacgcccgcagcgccgaccgcgccacacgcagggaatgttacgaggccctcggcacgacgctggaagcgcacagcgcgcagctggacgatatctttgaccggctcgtgcacgtgcgcgaccggatggccaaaaagatgggctatcaaaacttcattgagctcggctactgccgcatggagcgcatgtgctacgacgtgcaggccgttcaggccttccgcgagaacatcgtgcgcgacatcgtgccggtcgtgtcccggctgcggctggaaaacgcgaagcgtctcggcatcgacacgttccggctctacgacaacgaatttttcacccccggcggcgacccgacgccctgcggcaaggacgacctgtttgcggcagcgcagaagatgtacgatgccatgggcgacgtgccgggcgcatttttccgcatgatgtgcgaaaacgaagcctttgacgtggagtcccgcccgaacaagtggggcggcggctactgcacggagttcccgaaattccggcagccgttcatcctcgcaaacttcaacggcacgtccggcgacgtggacgtcgtgacgcacgaggccggccacgcgctcaacgcctacctgatcgcggacaaccgcttcgcgctggagctcggctgcggcggcatggagaccgccgagacgcactcgatgagcatggagtttttcgcctggccatatctcgacgctttcttccccaaggcgggcgacgcggagcgctaccgcttccagcacgcgctcgatgcgctcagcttcctgccctacggcacgatggtggacgaattccagcaccgcgtctatgccgagcccggccttaccccggccgagcgcaacgccgtctggctggagctggaggcgaaataccgcccgtacatcgaccagagcggcatcccgtatctcgagcgcggcacacgctggcagtaccagatgcacatctacgagacgccgttttactacatcgactactgtctggcgcagacggcggcgttccagttcctgctcgcgtcgcaggacgattatgacgacgccttcgcccgctacctgcacctgtcgcagcagggcggcgaaaagctctggacggatctgctggccgaggccggcttccgctccccgttcgagccgggcgcgctcgcgcagctggcagcacgggtagagccgctcatccgcaaacacaccgtctgacaagggaggacaccgccatgtatgaactgacccaggtggccggaaacagctactacatccagagcccggccaagatcggcctcgtgcgcctgaacgacaccgacgtctgcctcatcgacagcggcaacgacaaggaggccgggcgcaaggtgcgccagattctcgacgccaatggctggcacctgaccgccatctacaacacgcactccaacgccgaccacatcggcggcaaccagtacctgcaaaaccagaccggctgcaaggtctacgcccccggcatcgagtgcgatttcacgcgccacccggtgctcgagccgtcgtttctctacggcggctatccgccgaaggagctgcagcacaagttcctcatggccaagcccagcgacgcgcaggagctgaccccggcgtgcctgccggaggggtttgagtggctttcgctgccggggcactttttcgacatggtgggctttcgcacgccggacgacgtggtgtatctggccgactgcctgtcgagccgggagacgctggaaaagtaccagattggcttcctctacgacgttgcagcctacctgaacacgctcgaaatggtcaagacgctcaccgcccgcgccttcgtgcccgcgcacgccgcggccacggaggacatcgccccgctcgcgcagtacaacatcgacaaggtgctcgagatcgcagacatcatcacggagctctgccagaaaccgcagacgttcgaggcggtcttgcagcagttgttccggcgctttgatctcgtgatgaactttgagcagtacgtgctcgtcggcagcacagtgcgctcctacctcgcgtggctgaaggacagcggcagactccgcgccgtctttgacgacaatcgtctgctctggcagcaggcatgaagtgcatgcaaaaaacctccgcatccgatcggatgcggaggtttttcattccagaagtccgtatttttctttcacacgcgcgagtttacgcaatagcggctgatgcagcaggagcagaaacacggccgtcgcacccgcgtggatgaggttaaatacaaaccccgatgcgcaggtcgcaagccacagctgccacgagggcacggcgttgtacatgagcatgctcgccgtatcgagcagcacgccgtagacgatgagcaccgagaaaaagccgtagagcagcagcggcacgagccgtaccttccgcccggcaaacagcacgccgccgagaaagcccacgagcccgaagccgagcatctgccacggcgtccacggcccctgaccgaagaaaaagttcgagatcaggcccgccgccgcgccggtgacaaagcccgcctccggcgtgaaggccacggccgtgaggatcacgatcgcgcacacgggcttgcactgcggcagccagtaaaacgccgcgcgcccggccacggccagcgccgtcatcgttgcaagcagcacgagctcgcgcgcctgcggtctgcggccttcaaaccgcagcacgaacggcacgaacatcagccccacgagcagcagcgacgtgaggtagtacttccgctcgtcccacacgcacacgaacaccgccatcagcgccgggatcgccacgagcaagatgccgagcgcggcccaggtgcgccgcgtcagtcggtgagacattgtacgacctccccgcacagcaccgcgccgggcgcggcctcacgcgcgatgcgcgcggccgccgtggtgtaaaaataatgatcggagaaaaaggcgcgcgcggcgttttccgtcacgacctcgccgcgaaagagcaggccgcagcggtcggcatactgcgcgcagaattccacatcgtggctcacgacgcatacggccgtgccctgcgcgcagagcgcgcgcaaaagcgcgccgaattcttctttgaacgcgccgtccatgcccttcgtcggctcgtcgagcagcagcacgcgcggctgcatgagcagcaccttcgccagcgcggcgcgctgctgctcgccgccggagagatcaaagggatgccggtcgagcagcggcgcgagcgccatctgccgcacgaccgtgtccaccagcgcggcgtccctgccgagcgatgcgagatcggcgcgcaccgtgtcagccgcgaagagcgtgcgcggatcctgcggcacggcggcgatgccgtcgcgcaggggctggagcgcgcgctgcttcttcccgtcgagatacacgctgccgcggtacagccgcagccgtccggagagcacgccgagcgccgtcgtcttgccgctgccgttgctgccggtgagcgcgtagagctcgcccgggcgcagcgtgagcgagaaattgcgcagcacgtccgcgctgccctgcgcgtagcgaaaccagccgtcgcgcacggtcagcaccgggggcgtgtccacgggcgcgggcgccgcggccggcatcgggtgcggagcaaagcgccccagatacgctctgcccgcgcgcacggtgagcggcagacgctccgtctcgccgagggcggcggcgatgcgtgccgccgtgggcatggcggaaaagatcgcgtggccgcgcactgcggccgccgcctcctgcggcgcgccggcggccagcagccgcccctgctcgagcacgatgaggtggtcggccagcggcacagcctcctccagccgctgctcggacagcaggatcgtcagccccagctcctcgttgagcttgcgcagcgtgtgcagaaaggtgctcgccgcaatggggtcgagttggctcgtcggctcgtccagaatgagcacgtccggccgcatgaccacgacggacgcgaggttgagcatctgcttctggccgctggagagcgcggccacgtcgcggtcgaaccagtcggcaatgccgaagtagctcgccatctcggcgacgcacaggcgcatggttttttcctcgcacccaaggctctcgagcccgaacgccagctcgtggaacaccttgtccgtcacgatctggtcgtccgggtgctggagcacgaagccgatgcgccgcgcctgctcggcaaacgggatgccctttaggagcgcgtccccaaggcgcacagcgccgctgacagtgccgtgcggcgtgaggcaggtcttgagctggcgcaggagggtggatttcccgctgccgctctcgccgcagaggaccgtgaccgccccctccgggatcgtgagcgtgaggtcactcagcgccgggcgcgtctggcccggataggtaaacgtcagatgttcgagcgcaaacgacgccatgtcagcgcctcctttccatcaagcagcagcggcagaaagcacagcagcgcaaagcacgccatgcacactgcgccgagcacgccgctgccgccgatgcggatcgacgggtagtagcgcacatacagcgcgccgcagccgacgcccgcacacacgcccgcaagtgcgagcgcaagcacggcgctgagcacgccgtcgcgccgggtgaagcggtaattgccgaaatacgttcttctgccggcgccgtagccccggctcttcatggagtccgccgccgtgatgccgctctcaagcgcccacgagacggtgacggacaaaatgtgcgcgccatttttcagccgctgccacgcgctgccctcgcgcgtgccgcagccgagcgacgcctgcgccgcgcgcacagagcggatgtgcgcggaaaatttcggcacgaaccgcagcgccatgctcagcagcagcgacacgcccggcagcgcactgccgaacacgtacagatatttttccgccgtcatgacgacattgcagcactgaaaccacaaaatcacggccgcgaacatcgccgccgcggccgcgccgtagcacagcgcctcgcgcgtgacggggttgccgttcggcaggtagaacagcatcgtcacgcccgcgtggttcagcagcgcgttgagcgccgccatcagtaccagaaacggcacgagccagccgagcgtccgccccaggctgcgccagccgcgcagcaccgcgcagtagcccagcgcgcccagcaggctcagcgccagaaacaccgggtgcagcacgagcatcgtcagcagcagcacggccgcaaaatagcaaaaggtcagcgccgggtgcagcgccgagaaggaatcgttcatggttctccttgcagggcgccgacgtcgcgcccgagatcgcacgtatagctccagacgacggtgtcgccgtcatggagcgtgtagccgctgcagccgtaatccggccagacgccgttgacgctgtacatccagccggacagctcgccgcagtcaaattcatagaggttgccgatgccctcgatataggcgctgttgtacgcgggcgtccaggtcgactccatgtggatgccctgcgcgcggcagacctgctgcagcacgtcaaacaccgtgtccccctccgaaaaggcgaccgtcgtctccggcaggagcacgccgtcggcgggtacgatgtccgccttgccgggcttcaggtcgtccatgtgctccagcaccgtgctgcacgcgatcttcaccgtgcagtgcagcgcaccggcatcctcctgcgcctgcccgccgcaagccgtgcacagcaaaagcagcaggcacagcagcagcgcgagcgcgcgccgcttagccacgctgcaccgtcgcattcacgaccgtgagcgcggccgtcgtcgtggcaaggctctcggtctcgtccgcagcggccagcacggcgtccgacaccgtcagcgccgcctccgccacaccgtcggcaagctgaaagcgcagccgcacgagcacgctgcccgtcgatgtggcgagcgtgccgcccgcctccggcaggcacagggcgcgcgcgctgccggtctcgttggcgcgctcggagtcgctctcccactccggcaggctgcccatcacgagcgggatgtccccgtccgccgtgccgagaaacgtgatctgcgtcgggtcaaaggccacggcgaggctcgccgcctcgtagtgcgcaccgtccggcagaccggagagcacgacatcgaccgtgcacgcgccgtccgcgtccgcgctctggcacgtgagcgtgagcgtgggctcggtgtcctcgacgctcttttgccgcagggcaatgcacagcaccaccaccgccgcgaccagcagcacggcgagcacgatggcaatgttctttttcgtccagaaagtcttcattgtccgtcctcctgcgccgtgggcagcgccgtattctgtacaaagctgtcggccagcgcgcgcacatcctgcgcgtcgacgcggccgttaagatccacgtccatcgtcagcagcagctgcgtctccgggaccgtgctggcggcgcaggccgtgcggatgttcagcgcgtcctgcgcgttgatgacgccgtcggcattcacatcgccggcggtcaacaccggccccttaccttccgtcacggtgtagtttgccgtgtcgttgagcgcatcatccgtcacgtccggcgcaaagagccagacccacgtcggcgtgtcgctgcgctcagagagcacggggctgtagagcagctgcgtcccatcggaaaacgtgaccgtgctgtccgccgccgcatccggcaggcacacggcgaccgtgcggtatccggccgggatgagaccgctgccgtccgccgtgcagagcacgcgcgcgaccggctcgtcgggctcggcgggcgtttcgaccgtgggcgcgtctgtctcctgatagaggccgctctgcccgcgctggaagcgcgagacggccacgagcgcatacaccgcctgctccgtggcgaggctgtcaacgccgccagaggccttgtggcggaacgcggccgcgcccgcatcgtaaaacgtcagcagcgcatcgactgccgagccgccgtctttgacgaagcggctgtccgtgtccgggtcgatgcccagcgccgtgcaggcaacgatgacctgcgcgacgctctcggcgttggcagagccccacgaggtgaagccgccgtcgccgttttgcatggcagagagcgtatcaacgccgcgcgacacggccgccgcgacggccgcctccccgcggtacgacgccagcgcctgcagcaccatggccgtcacgtccggatcggccgccgcgccgttcatcgcccagccgccgccggagagctccgccgcgaggatcgcatccacgcactggcggcgcaccgcgctgccggacaggtaattgcggctatcgagcgcgagcagggcaaacaccgggccgttgatgccctgattgcgcacccaggcaaagtcggtatacggcgcggtgaggtcgcagccgccgacctgcgtcgcgtcgcgcccgatggcggacagcgcgaggatgacgcgcgaattgtccgtggatttataggcgttgagcgcgccggccttgccggacgccgccgtgagctccggtgctttggatgcgacgtctgcatagtagcgcgcaaaatagtcgctgtccacggcaaaatacccgccgcgggccaggcccagcaccgtccactcgtcgccgtagcccggcgaagggacggccaccgcctgatgcgccagcgcggccgagagcaccggctgcacatccgcgccctgcgccgtcggggccggcagcaccgcgcacacgagcaacagcgccagacacagcgccagaaaccgtttgttcgttttcatgatctgcctcctaaaggggtcttctacgcacgcggccagagcgcgtgcgggttttccgaaatcacgcaacattataccagccggatcgcgcaaaagcaacgctctgcggcatttcccgccccggcgatgcatggactttctgtcaagttttccggcaggccgcttttgcgcaatttcccacgcgcggcgtgctaggatacccccatggacgtcatctatctcgacagcctgttcgggctgaatctgctgatcgactactgcctcgtgctggtctccgcgcgcgtgtgcggcgtggtgctgcgccgctggcggtacgcgctcgcagcgctcatcggcgcgctgtatgccgccctcatggtcctgcccggcttcggctggctggcaaacggtatgatgaagctcgcgctcggcgcggccatggcgctcatcgccttcggcggggaggcgcacctcgtgcggtgcacggtggtgtttttcgccgtgtcggccgcgttcggcggcgcggtgtacgctgcgagcatgctcgcgggcgtgtcgccgggcagcggcgcgctcgtgacggtgtcgggccgggtgctggcactgtcgttcgccgcgtgctacgcggccgtgtcgctcgtgttccgccggcgggtcagggccgccgaccgcgaggtgcgcaccgtgacggtcacgctcgccgggcgcagcgtgacgctcagggccctgcgcgacagcggcaacgacctgcacgacccggtgtccggcctgccggcggcggtggtcgagcgcgcggcggtgctgccgctgtttccggcggtgcacgcactgccggacgacgcggtgcaggcgctggaggcgctcagcgcgctgccggagtgcaccggccgggtcgtgctgttgccgtatcgtgcggtgggcgtgaccggcgcgctgctgccggcgttccggccggacagcgtgaagattgacggcgcagcagagccgatgctgctagcgctgagcgcgcaggcgctcacatccgacggcgcattcgccatggtgctgccgccaaaaagctgaggaggggtttttcgtgccaggatttctggaaagactacatacgctctgggcggcgctgcggctgcggctgcgcggcggcgcgccggggctgttttacatcggcgggagcgacaccatgcccgccccgctcgaccgcgcggccgagcagcaggccattcgggcgctcgccgccggcagcgaggaggccgcctccctgctcatcgagcacaacctgcggctggtggtgtacatcgcgcgccggtttgaaaacacgggcatccacatcgaggatctgatctcgatcggcacgattggcctcatcaaggccattcacaccttcaagccggacaagaacatcaagcttgcgacctacgcctcgcgctgcatcgaaaacgagatcctcatgtacctgcgcaagtgcagcgcgcagaaaacggaggtgagcatcgacgaaccgctcaacaccgactgggacggcaacgagctgctgctctcggacattctcggcacggacgccgacgccgtgagccgcccgctcgaggacgacgcggagcgcgccatgctcctgcgcgccatcgagacactcggcgagcgcgaccggcagatcatcctgctgcgctttggcatcggcggcgcgcgcgaggcgacgcaaaaagaggtcgcggatctgctgggcatctcgcagagctacatcagccggctcgaaaagcgcatcatcgcgcacctgcgtcaggaaatgctcaagcagatgcagtgctgaaaatatgccaaagcggcggctccggtcggagccgccgctttgtctgtcattttttcacgcggcactgaatgcgctgcacaccgcaaaagagcaggaacaccacaagatcgaccaccacgacgctcgcgccggacggcgtctcgagcacataagacagcaccatgccgagcaggaaattcaccactgacaccacggccgcgcagatcgtgaccgagcggaacgtgccgaacacgcgcatggccgtcagcgccgggaagatgatgaggctcgagatgagcagcgcgcccatcatgcgcatacccagcacgatcgtgaccgccgtgagcaccgcgagcagcatattatatgcctgcgtgtgcacgccggtcgcgcgcgagaacgtctcgtcgaacgtgacggcgaaaatgcgcggatagcacagcacgaacagcgccagcaccgccgccgacaaaatcaggctcaggcgcaggtcggccgacgacagcgacaggatgctgccgaacatgtagttattcacatcggtgttcatgccgctggtcatggacacggtcatcacgccgatggccagtgcgctgctcgagagcagcgcgatcgcggcgtcgcccttgagcttgccgttttgcgacaggcgcagcagcaaaaacgccgccacaaccacgaccggcaccgccacggccagcggcgcgagattgagcgccgtggcgatggcgagcgcgccgaagccgacatggctcagcccgtcgccgatcatggaatagcgcttgagcacgagcgacacgccgagcagcgacgcacacagcgacacgagcacgcccacgacgagcgcgcgcacgagaaacggatacgatagcatttcgaggatgactttcatagcttccgccctcccagaaaccggcgcgcggcatcgctctgcttatactccgccgccgtgccgaaaaagagctgctggtggcccaggtgcagcacgtgcgtggcgtagcgcagggcggcgtcgatgtcgtgcgtgaccatgataaccgtgatgtcattgcagaggttcacgagcttgatgaggttatacagttcccccgtcgccacggggtcgagacccgtgaccggctcatcgagcaacaggagcttgcgcgtggcgcacagggcgcgcgcgagcagcacgcgctgctgctggccgccggagagcgcctgatagctgtggtgcgccagatcctcgatgcccatgcgctccatgttctcctgcgcgcgggcgcggtcggcccgcgaatagaatgggcggccgtgcatctggttgatgcagcccgagcgcacgacctccgccacgcttgcgggaaagtcgcgctggagctgcgtctgctgcggcagatagccgatctcgttgcgcacgagcccgtctccgagcgtgatgctgccctgctccggcgctttgagcccgagcaggcccttgatgagtgtggacttgccggaaccgttttcgccgaccacgcacaacagatcgccgcgcgagaccgtgaagttcacgtcgcgcagcaccgtctgcccgtcgtagccgaggcagacgtgttcacaagtaatgagtgccataattagttcaatgcctcccgcagcgcctgcacattgcgctccatgagctgcaggtacgtcgcgccgtctgcaaatgcctgcgccgtcacgttgtgacaggtcgcaaactccagttttttcgtgcccgtggcctcgcagatcgtgtcggcgagcttgccgttcgacagctcgatcgtgaacacgaccgggatgttctccgcgcgcaccttgtcgatcagaaacgccaccgtggccgccgatggctcggccgcatccgcgcagccggtataggcagcataatagtccagaccataggcctcggcaaaataccgcagtgggaaacggtctgcaaaaaccatcgtttttcgagctgcatgcgccactacatcctgaaattccgcatccagctgctccagcttctccacatagtccccacaccgctgcgcatacgccgctgcgtgcgcgctgtcggccgcagcaaacgtatccgagagcttctggcagatgcgcgccgcgttgcgcggcgacgtccagacgtgctcgtccggctccgtgccgtcggcctcgtggtcgtgcttttccgtctgcatgccctcgacggtctcctcgtcgagcagctccacgcagtccatgagcgtcacgacgcgcaggttcgggttgtctacaccctcaagcacggtcttgacccaggcgtccgactcgccgccgacgtagacgaacacgtcggcattgcggatggcaatgatgtctttcggcgtcggctcataggagtgcacctcgcagccggggcgcagcagcatcgtgaccgacacatcgtctccgccgacctggcgcgcgaaatcgtagggcgcgaagatcgtcgtgacgacgtggagcttgccgtcgtccgcgtccggattctgctgcacggtgcagcccgaaaacgccgacatggccagcaccattgccagcagcacacacaggctcttacgcatggccgtcacgctttctgccgcaggcggcgcacgtgccgtagatcgtcgtgctgcggccatcgaccgtgaagccggccgcgcgcagcaggtccgactgcagcgcatcggacacgtcctcgtccagatggatcagccgcccgcagtccacgcacttgaggtgcaggtgcgcgtcgcagtggccggggtccatggcctgataggccgcgctgccgccgctctcgggcgcgaagcggcgcacggtaccctcttcgaccaggcggtcaagcgcacggtagaccgtgctgcggccgggagcttcgtcgcccatggccgcgagcagctgctcgaccgtgaactgctcgtccgcgtgcgcagacaaaaacgccagcagcgcacagcgctgctgcgtgtgataactgtttcgcatggtttcgcctccaaatcgggaatgagtcccgaattcaagccgtagcatacacgcagtttgcccgtctgtcaaggggaaaatgtaaaaatgtaaaaaatcccgccggacattgcgtccggcgggatcttgggtttggattcaggcgagggcggcctccggctcgcccgcatcgccgagcgtgtcgctgatgaactgcggcacctgctcgcgcggcatgtccagcgcgatggcaagctctccgtggagcatctcctcggcgcgcttcatatagcgctcgtcgacgaggccgagcttcttgccgcgctcggccatccggcggcgcttggcgcgcacgtccttgatcaactgcagaagatctgcgcaggtgtaatcctgaatgcactgctgatagtgctcattgagaaagcggaggttggaattttcatagacctgcgcggtcatctgcggaatgcggtcaatgagcgcgagcgcctcctcgcgcgtgatcacaggccgcatgaacaccttgctgtccacgggtgtgaacaccttgccctcccggtagatgggcgcgagcgtatagtactcccggtgcttgtccacaccggagatcttcggcgtaccgatctcctccacgcggcagacgccctcgttgccatacacgatcaactgaccaatttcgtacatttgaatatcctttcctcagccaaacaaaaccaaaaacaaacaaagcagggcggcattgcagccgcactgcggccgcaaccctgccccctaatagatagtttagcacaaaatttgcaaaaaggtaagacttttttcatttaggacttgatttttttacggaaacggatagaataaacaatttatagagcgtaaaggcaggaaggaaaatccgcatttgctactttgagggggaaaatcaggatgcatatcgggtggaaccgcatctggaaagtgctgctgggctgtgcctgcgtcatcgggagcatcgtcctactcgcctgtgggcaggtcggctggggcattgcggcattggaagcagccgtgctgctgctcgcgctgcaatatgcgccgcgcgcggcgcggctgcggaaaacgtggtggttcgtggagctggtgctcgtgctcgccgtcaccgtggggtacgccggctttgccgccgtgcgcgcagcgcagacaccggcgtccgccgtcgtcatcacgacggagcgcagcgtgccgccggtcacgccggcgccggagaccgcagcgccggaaccgaccgccacaccggagccgacgcccgcacccgacacagcggaggcgacctgtgtcgccagccgcaaggcaaagaaataccaccagccgtcgtgccagtacgccgccaagatcaaggacgagaacctcgtgacctttgacagcgccgcgcaggcgcaggccgcgggctatgcgccctgcggcgcgtgcaaaccataagaaaaaccgcgctcccgtgtatcgggagcgcggttttgccgtttggagatcacatgtgcagatccgggtagagcgggaagcgcgcgcacagatccagaacctgcgcacgcacggcgggcacggcggcctcgccctcgtcgatcaggcggcagatgagcgcgccgatctcgcgcatctccccctcgcccatgccgcgggtcgtgacggccggcgtgccgagccgcacgccgctcgtgacgcgcacggactgcgtgtcgaacgggatggtgtttttattggcggtgatgttcgccgcgtcgagcaggtcctgcatctgcgcgccagtgcggccgcggctgtagacgtcggccagcatgagatggttgtccgtgccgccggaaacaaggcgcacaccgccctgctgcagcgtctcggcgagcacggcggcatttttgaccacctgctgctgataggcgcggaaggccggctgcagcgcctcgccgaagcagaccgccttgccggcgatgacgtgcatgagcgggccgccctgcgtgccggggaaaacggcgctgtcgatctttttggcaagctcgtcgcggcagagaatgatcgcaccgcgcgggccgcgcagcgtcttgtgcgtcgtgcaggtgacgacatcggcatacggcaccggactcgggtgcacgcccgcggcgacgaggccgccgatgtgcgccatgtcgaccatcaggtacgcgccgacggaatcggcaacagcacggaagcgcgcaaagtcgatcacgcgcggataggcgctcgccccggcgatgatgagcttcggtcggacctcctcggccacacgcgcgagcgcgtcatagtcgatggtctcggtctcggggtccacgccgtaaaaatgcgcctcaaaatatttcccggacaaagacgccttgctgccgtgcgtcaggtgcccgccgtgggagaggttcatgccgaggatgcggtcgcccggctgcagcagcgccgcgtacacggccatattcgcctgcgagccggagtgcggctggacgttggcatggtcggcgccgaagagccgcgtcacgcggtcgatggccagacgctcgacctcgtcgacgtagtcgcagccgccgtaatagcgcgcgccggggtagccctcggcgtacttattcgtcaggtggctgcccacggcctccatcacggccgggctcgtaaaattctcggacgcgatcagctccagatggtcgcgctggcgccccagctcccgctccatggaggcgtacagctccgggtcggcctgcttcaggtgttcataattcatatcggaaacctccgtttgtgtcaaaatcgcgcaaccagtttaccacaactcagacgtatttaacaagaggaaggcgcgtaaacttatactatcccgatctcgtccgaggtgatgcaagttgaacaaatggaagcgcatccgcccgtatgttgccttctgcgcgatcgcgctggccgtcggcggcgcgtcgagcctcgctacccgcgcgggcatggccggctttgacctgctgacgaagccgccggccgccccgccggactggctgtttcccatcgcgtggacgattctgtacctgctcatgggcatcgcgatggggcttgtctggcgcagcagcaccggccgcgcgcgccaggaggccaccgcgctctggagcatccagctggccgtcaacggtctgtggccggtgctgtttttcctgctgggtgcgcacgggccggcgtttttctggctcgtggggctgatcgtgctcgtgctgtttatgatcgcggatttttcccgccgcaatgccacggccgcatggctgagcgcaccgtatctgctctggctgctgttcgcggcatatctgaacctcggcatctggctgctcaatcggtaaggtttggggaaagatcacgtcaagattgtgtttgcatggcgcgggagattgtggtacactgcccccgaggagggaactgccccatgaaaaaaccgcttaagatcatactcatcattctggccgtccttgtcggcctggtcgccgcgctgctcatctggctgaccgctacgcagctgaatgtcaagaccgagactgccgtcgtgacccacggcgagaacagcaccgccagcttcgccccgggcgacgacgtgtccatcctgacgtggaacgtcggctacgccggactgggcgaggagtccgatttcttcatggacggtggcaagcaggtgcgcgcgccgagcaaggccatcgtagagaagaatatggacggcatcgtcagcaccgtgaaggagctggacgccgacttcacgttcctgcaggagatcgaggccgacccctcgacccgctcctacggcattgaagaggccgaacggatgcgcaccgagaccggactcgacaccgcgcacgcgcgcaactacaaatgtgccttcgtgccctaccccatcccgccgatcggcaaggtgagctccggcatcatgacgctctcgaccgcgcccatcgcctcggccgagcgcatcgccctgccgagcccgttcaagtggccggtatcggtggccaacctcaagcgctgcctgatgccggtgtatatcgacctcgagggcacggacgcgcagctcgtgctcgtcaacctccacctggaggcgtatgacgacggcgaaggcaaggccgcgcagaccgccgcgctcaaatcgttcctcgaacaggaatacgccaagggcaactacgtcatcgccggcggcgacttcaaccagacgttccccggcgggctggacaagtacccgatcaagaacgccgatctctggacgcccggcacactcgacgacagcatgctgcccgacggctggcactttgcctacgacacggccacgccgacctgccgcctcgacaaccagccctatgatgccgagagcgacgccacgcagcactacgtgatcgacggcttcatcctctcgccgaacgtggagctcacgggcgtacagacgcaggacgacggcttccgcttctccgaccacaaccccgtgctgctgaatatccggctcaaataaagcatatcaaaaagcccgcttccgaccggaagcgggctgattttttattttgcgcgcgtgatgtgcagctcgcggcaggaatttgggccgaagagcgcctccatcccctttcggtacgcggggaaggcatcgcgcggcatgagcgcctgcacgcacccggcaaagccgccgccgtgcacgcgccacgcgcccacgccgtcgagcagcgcggccgcgcgcgccagcccgcgctcaagccggtcgtcgccgcccggggcgcggatgttgcgcagcagctgctccgacgagcggccggaggcattcatcaggcgcaggtacgtctcggcgtcccggtgcacgagcgcgtcgcgcatgagcggcacgcgcgcgttctcctcaaaaaaatgcgccgcgcggtcatcggcaaggcccggctgccggtgggcatagaaatccgccggatcgacctgcgagagcgtctcggcgccgaagcgccgcgctacgcggcacatatcggccggcagcgccgcatacgccgccgtcagccccgcgtggctgccgccggtgtccgtcaggctcagcgtgaggcccatgtcggcaaacggcgccgcgaccggggcgatctccccggcggcgaagtcgatgtacaccgcgccgtcgagcgcgcacgcgagctgatccatgaggccggacggcttgccgaagtggcggttttccgcctgctggccgaagcgcgcgagctgctcgggcgagaacgcgccgccgttgtagagcgcgttgaagatgcggccgacgaggatctcaaacgcggccgacgacgacaggccgccgcccggcttgagcgcggaggacgcccacgcctcgaagccgccgacagcaccgccggcgtccagaatggccgccgccatgccgcgcacgagcgcccacggcttgccatacgcgcgtggatccacggccagatcgtcgagcgcgaccgtgaacggccggtatcccttcgagtggatgcacacgcggcggtcacgccggcgcgtcgcacgcgcggtgatgcccacgtccacggaggccgccagcacgcggccgagctgatgatcggtatggtttccggccagctccgtgcggccgggggcaaaaaatcgctgcatgatcttcctccgaaaaaagccggcaggcgtcctgcctgccggcttccgtgcaaaaactcagtgcttgcgcgcgagcacccgctcgatgccgcgcacgacgccggccgcgtccacgccgtacttggccagcaggtcggtgtacttgccggtctcggtgaacgtgtcggggatgccgacgaactccgtcggcgcgcccgtgccgccccaggcgagcacttccgccacggcgctgccgaggccgccgtagatgttgtgctcctcggcggtgacgatcgcgcccgtctcctgcgcgcagcgcaggatgagctcgcggtcgatgggcttgatggagtacatgtccaccacgcgcacggacacgccgcgcgcggccatctgctcggccgcctcgagcgccttgtgcacgaggatgccgcaggcgatgacggtcacgtccgtaccgtcgcgcacgatcgcgcccttgccgcactcgaacttcgtgttctcgtcatacaggtccgggtacacgtcgcgcgacaggcgcaggtacatcgggccgtaggtgtccacggcgtacttcgtggcccagcgggtgctggtcgcatccgacgggacgagcacggtcatgttcggcagtgcgcgcatgacggcgatgtcctccgtggcgtggtgcgtcgcgccgtcgagcgcgtcggacatgccgcagtaagcgccgccgaacttcacgttcaggttgccgtagcacacctgcgcgcgcgcggagatgagacccagcgtggtcagaaagaccgtgaacgtgttcacgaacgggatcttcccggtcgtggcaaggcccgccgccgtggcgaccatgtcggactcggcgatacccatattgaaatggcgctcggggtgcgccttggcgaagatgccgctcttggtagaaccggacaggtcagcatcgagcacgacgatgttctcattggtgtcgccgagctcggcgagcacggtgccgtaaacttcacgaatggactttcccatcacacgttacctcccagttcctgcattgcctgcgcgaattcggcgtccggaatggccttgccgtgccaggcggacttgccctccatgaaggacacgcccttgcccttgatcgtatcggcgaggatcacggtcggcacgcccttgcaggcgacggccgcgtcgagcgcagcgtcgagcgccgccagatcgtgcccgtcgcagcgcagcacgttccagccgaaggccttccacttgccgggcaggtcacgcagcggcatgatctcgtcggtcgtgccgtcgagctgcaccttgttccagtcgacgatggcggtgaggttgtcaagtccgaacttcacagccgaggcggccgcctcccagacggcgccctcatcgagctcgccgtcgccgagcacagcgtacacgcgcgcatcggaatggttcagcttcaggccgagggccatgccctgcgcggcggccaggccgatgcccagcgggccggacggcatatccacgcccggcgtgcgcatgcacgggtggccctgcagggagctgccggtctggcgcagggtgttcatgctctcggtgggcaggaagcccttgccgatcaggttgcggtaaagcatgggcgcggcgtgacccttgcagagcacgagccggtcacggtccggatcgtcggggtgcgcggcgtccacatgcatgcgctgctgatacagcagcgtgaggatctcacaaacggacaggctgccgcccgggtggccggactgcgcgccgtggatggcggtgagtacgtcgatccgatactgccggcaaagctcctggagctcggccgtgcgttccggggtcaaagacatggtggtttgtcctcctgtttgatgttacttaataaagatacaacgcacgttttttgatgtcaacggcgcgagccgatttttcgcgcgttttcccttgttaattttataatcgttgctttaccgggcgacaatcgttataatcaaagggactatatttattgtctgcatccccgcagaccattcaggaggcgaggtcaatggaccccaacaaagcgctcaacatgaccatgctctgcgatttctatgagctgacgatgggcaacggttatcttgagcacggcatgcaggaccgcatcacgtattttgatgtgttcttccgcagcgtgccggacgacggcggctacgccatcgccgccggtctcgagcagatcatcgactacatcgagaacctgcacttcaccgacgaggacattgcctatctgcgcagccggaagctgttcagcgaggcatttctggactatctgaaaaacttccgcttcaccggcgacatctgggccgtgccggagggcacgcccgtgttcccgcgcgagccgctcatcacggtgcgcgcgcccgccatccaggcgcagctcgtggagacgtatctgctgctgcagatcaaccaccagagcctgatcgccacgaaggccagccgcatctgccgcgcggcacagggccgcacggtgctcgagttcggctcccgccgcgcacagggcgcggacggtgcgatcctcggcgcgcgcgctgcctacatcggcggctgcgccggcaccgcctgcacgatctcggacgaggtatacggcgtgtacgccggcggcacgatggcgcactcctgggtgcagatgttcgactccgagctcgacgccttccgcgcctactgccagacgtaccccgacaacgccaccctgctcgtggacacctacaacagcctgcagtccggcgtgccgaacgccatccgcgcgttcaacgaggtgctgcggccgaagggcatcacgcactgcggcatccgcttcgactccggcgacatcgcctacctgacgaagaaggcgcgcaaaatgctcgacgacgccggctggcccgactgcaagatcaccgtatccaacgcgctcgatgagcgcctgatcgcggggttgctgcgccagggcgcgcagatcgacagcttcggcgtgggcgagcggctcatcaccgcgcgcagcgagccggtgttcggcggcgtgtacaagctcgcggccatcgaggacgaggacggcaacatcatcccgaagatcaagatcagcgagaacgtcggcaagatcaccaacccccactttaaaaaggtctaccgcttttacagcaaggactccggcatggccgaggcggactacatctgcctgcacgacgaggtcgtggacgacacacagccgctcgagatctgcgatcccgacgcgacgtggaagaaaaaagtgctcaccgacttcacggcgcgcgagctgctcgtgcccatcttccgcgacggcaggctcgtgtatcagaagcccgcgcttgatgacatccgcgcctactgcgcgcagcagcttaccacgctctggccggaggtgctgcgcttcgactacccgcacaactactacgttgacctgtcggaaaagctgctgaagatcaagctcgagctgctcaacgccggcggaaagtcgcagggctgagccgtggaagctgctgcccgccgtcaggccattctcaaccggctccggacggccgaccggcccgtgagcgcgtcgagtcttgccgccgagctgaatgtcagccgccagatcatcgtgggcgacattgcactcctgcgcgccggcggtgccgagatctccgccaccccgcgcggctacgtgctgccgcgggcaacggacggcatcacgcgcacgatcgcctgccgccacacgctcgagcagaccgggaccgagctcgacatcctcgtcgacaacggctgcaccgtgctcgatgtcatcgtcgagcacccggtctacggccagctcaccggccagctgcagatcagcagccgctacgatgtggagcagtttctcgcgcgcgtgcaggcgcacgacgctgccccgctgagcatgctcaccggcggcatccatctgcacacgctgcgctgcccggacgcggccgcctgcgagcgcgcctgcgccgcgttgaaagcggccggcctgctgctggacgattgacagaagtttaatttagttgacaagtgcacaggaagactttatagtatgctttacaggtgtcatgacacctgtaaagcatacttattttctggaggaatgcactatgcagcggttccgggactttctgaagcgaaaggatattgagatctctctgcggcgctacggtatcgacgcgctcggcgcgatggcacagggcctgttctgctcactgctgatcggcacgatcctcaacacgctcggtcagcagttccacatcggttttctcaacgcgatcatcttcaccctcggcaagggcgacgccgcggtcggctacacgatcggcgggtgcgcatcgctcatggtcggcccggcgatggcggtggccatcggctatgcgctgcacgcgccggcgatggtgctgttctcgctcgtcccggtcggctatgcgaccaacgccatgggcggcgccggcggcccgctggccgtgctcgtgacggcgatcatcgcggccgagttcggcaaggccgtgagcaaggagacgaaggtggatatcctcgtcacgcccatcgtcacgatcctcgtcggcatcgggctggccatgctcgtggccgcgcccatcggtaaggcggccaactgggtcggcacgctcatcatgtgggcgaccgagcagcagccgttcgtcatgggcatcctcgtgtcggtcatcgtgggcatcgcgctcacgctgccgatctcgtcggccgccatctgcgcggcgctctcgctcacggggctcgcgggcggcgcggccgtggccggctgctgcgcaaatatggtgggcttcgccgtgctgagcttccgcgaaaacggctggggcggcctggtcagccagggactcggcacgagcatgctgcagatgggcaacatcgtgcgcaacccgaagatctggatccccgccatcgtgacgtcggccatcacgggcccgatcgccacgtgcgtcttcaagctgcagatgaacggcgcggccgtcaactccggcatgggcacgtgcggcctgtgcggcccgatcggtgtgtggaccggctgggtcgcaccgagcgaggccgccgtcgccaacggcgccgtggccatccagcccggagcgatggactggatcgggctcgtgatggtctgctttgtgctcccggccgtgatctgctgggcgatcggtctgctgtgccgccgcctcggctggatccgcgagggtgacctgaagctggactaaatccccgtacatacaaaaccccgcacaggacggtgtcccgtgcggggttttctttacatcccaaagagccgaatgcccttgacgagcatcgacagccccagcgtcacgaccagcacggcgctgcccttgacgatgtacttcatccagccgcgcggcagaaacgactgcagcgcgccgaacagaaacagcagcggcaccgtgccgagcgagaacaccagcatcacgagcgcgccgcgcgcggcgctgccactgctcatggcgcagagccacatggcgctgagtgcgccgcacggcatgaagcccgtgagcaggccgatgatgagcggcctgccggcaaagcggcggcgcgtgcgcgcattgaggctgcacgcaccgggcagctccgtctccgtactgcgcaggcccggcaggatgcccgccatgcgcaggccaatgagcagcacgagcgcgcccgcaacggtaaagaccatgctcttgatgttcggcgtgtaggtgatgaccgcgccgagcgcgccgcagagcgcgccgaccgccgtgtacgacacgacgcgcccgccattgtacgcagccgaggcgatgagcccgcgcttgctgcggccggtcacgccgcgcgcgtccgtcgtctgcgcgagcagaatgccgccgcacatgccgatgcagtgcgtgctcgtgagcaggccgacaagaaacacgagaccgagcgaggcattgtccgcgagcgccgggactttcacgagcgcgagcagcttcggcagcccccagtagagcacgcccacgagcgcaagacagatcccatcaaccaccacgccgcccatgccgtgcgtgcccggcggatagccggcattcgtgagcacctgccgcagcgtgtcctccgtgacgatgttcggatcatacgtgatcgtcacgcggccgcgccagtagtgcgcctgtgcggagacgacgccgcgcgtgtgcagcagcgcatccgcgatggcgtcctcgcatgcccggcagatcatgccggacacattcagctccagaaccgtggtcgtcatggccgctcccccttcgtttcgttcccgcgcagcgcacacagcagcacgccgccggatgtaccgcacgcaagcaccgccgccgcggccgggccgatcaccccgcacgcagccagcggcagacacacggcatgatacgccagcagcagccagatgccccggcgcacggtgcgcgccgtccgcgcggccgacgcctccgcgccgcgcgtgagcagctcgccccgctcggccgcacggcgcgggaaagcacggccgcaggcccgtgaaggccgcataggcactgtacgcaaacaggataagcgctgcgagcagaccgggtacgtccggcccgagactgccgccgcgcagcacgcgccacgtgccgcgccaaagagcaccgctgccgccagcgcaagctgcacgagctccggcggccgccacagcatcagcgccgtgagcagcacgccaaatcccaaccggcgcgccagccgctggcgcgtccggccctgctgggcctcctcgccgccgcgctgcgccgtcagctccgcgcccgggccgagcaccgccgggagcgccgcagcgtccgtgccgaccggccagagcgtcaccatgaaggtatcgcccgcgcgcgcagcgctgcgcacgccgaacaccgcccgcagccgcgcctccgccccgtcatccgcgcccgggcagcgcagctccgccgtctcgaccggcacatcaaagcccgcgcgctgtacgcagcgcgcgatctcaccgaggccgacggccgcctcgtcatacgtcaggcgtgcgcagccggccgtgtcgctcacggacaccgcatgcacccccggcagcccccgcagcgcgcgcacgatgcgcaccgcgcaggcgccgcagtccatgcccgagatgcgcaggatcacgtccgtcatttttgcctccgcctttcgtaatttaccaactggtcagtaaaaaagatagcacgctgccacaattttgtcaaggcgcggcgtggattttcccggccatttgacggacgtcgaaaatcgcagtataatcgagacatcccagtagtccggaggcgaccaagatgccgatcattgtcgaccgtgaccagatccgcatggacattctcatggcgtttcagcgctgcatcgagcgcaagcccatgatgaacgtgtccctgcgcgacattgcagccgaggcgggcatgagccacgccaagctgctcaactatttcgagagcaaaaacgatctcatcctcgcgtatgtgcgctatacgcgcgaatatatgagcgagaagtgcagccagtggttcgccgggcacgaccgcgcggactatgcctccaacctcgcgtacatgaacgcttttatggactatgtggccaatgccccggcgcacgagcagcgcccgaacgccacgacgcagacctatgtcctcgcgcgctacgaccccgagatcggccggctcgtgcaggaggagttccgcgcgtggcgcacgctcatggagcagtgcctcatccgcatctacggcgaggaggtcggtatgcacgaggccgaggcgatgatgatcctcatcgccggcacgttcatctgcaactacaatcaggcgctcaccggcgagatcaatgacaacattctcggctatctcggcaacctgaaccgctcctgacaccgaaaaaagtcatccgcctgacggcagcagccgtcaggcggatttgcatagggggaaaggatgtgaaaaggtattactcgtttgggtgtgcatcacagtagtgatgatagatattctcgatatacagcgcagcgtcgcggccgcggccctcggcgagcatggcagtgatgcgcgtctcctgctcgatgaccgtctccggcccccagaaggtcacgcaccgctcccagagcacgccgctcacgtccgcgaggctgttcatgagcagcgggaagatgaggttgccgctcagctcggtgatggtcgtgtcaaacttgcgcatccaccgtgcgtaggcagcgatgccctcccccgcggcgagggacgtgcgcagcccgtcggtaatggcgcgcagctggtcgatatcggccggcgtgccgcgctcgccgagcaggatcatggcgccgccctcgatcgcgtcgcgcgcctcgacgagggagctctcgatggcatggtcgaactggccgccgtatttcccgagggccatgagcgtctcaaaattgccgtggcgggcgtagtcctcgatgtagttgccgcggcgcggctccatgcgcacgaagcccatgcgctcgagatcctcgagcccggtgtgcaccatcgagcggctgatgtgcatctgctcggacagctcgcgctccgacggcagccggtcgccgacccggagctcaccggaaaagatcatgccgatgacctgatcgacgaacagctcccggagcgtcggggcctgaatctgctgaaatcccatcagaccttctcgtcgaccttgcggtggtcatagagcttatccagcagcgggcgcaccaggaaatagatcgccttgttatcgagattgaaccagtagataagcatgctccccacccagacgccggccgcgccgaggagcagctttggcagcagttttttcatcgtcatttcctcctgtttaccagccttcgtagtcgtcatactgcagcagggacgcatcgagcggctcggcctgcatgacggagtacatgtagtcgttgacctgctggcggatgtcggcgcgggagatggtgcggtggtcgaacatgtcgttggagaccaccatgagcttcgtctgcttctccttcgcctggtcgaggatgacgcccgtgaggccgagcgcgcccttgcaagtgatgtcatcgtgcaggatgaccatgtcgcagtggaacttctccgcctcgtcccagaactccacgaggtgctgccagccgccggtcaggtggcggcgcatgacgccggtctcgtagttgcgggcaatgccgtcgagcatggtgttctcgtccgtcgtgtcgatgagcacgttgccggagaacagatccatgccggcgatcacaaggataccccagcagttatacagccagttcgggaactgcagccagtagcacggcgggccgccccaggtgatggcgcggtagcgcgtcttggggaagcagttggtcttgctctcgtacgcctgctcgaggatcttcatgacctttttctcggtcttcatgaccttggggttgcggccgccggaaaaggcgtagtagtaagtgtggaacaggttcggcacggtgagcgcggcggcggtgtagggcgtggccatgaagttccacttctccatctcgttgcgcacctcatcattgtgcttttccatcatggcgcggcaggcgtcccagtcatatgtctcgccggtgtgctgctcgacaaagctgataacacggcgcagggatgcgcgggcgtacttgcgcgtgtgcggatcggcccagcgcatggggatggcagccggcagcgtgtccacgtcgaggtggcgctcgatgagctggctgttcatggtcgaggagtcacacggggcgttattcgagatgcagcaggcgccgatcttcgggaactcatcgagcagcgcgacgccggcggaattgttcgacaggcggcaggaatccgccggcaggccgacactctccatggcgtcgatatagtacgggtttgcaccctgatccatgtagcacagcagcagtccctggaacggctcgagctgcgcggggcgcaggttcttgaagccggcgaggatctccgggcacatggtctgctcgagcacgacctgcgtgcggccgaaggcattgtcaccgaagcggcggtcgcccatcatcatctcggcgatggaggtcgtcgagcccttcatgatcgtgttgaggtacaggcgcgccacgcgcagcgccgggccgcgcaggccctcgacgcagcgatcgatcatgttcagcgcaccgaggtatgagcccatccagcggtaggtcagcataccgcgcgcgatgcgcaccgggctcttggccacaaagccacccataatgccgagcaccttgacccactcgacatagtcgtaccaggtatccttcagaccgcgccactcgcggtgctttgcaatattgctgccgggcagaaaacgatccccggcgcctttgaccttcttgtccgccatcacagtttccctccctgaatgtgcttgatctcgagactctccacaaacgcctgaatgcgcgtgcgcagctgaccggcgccggcgagggtgtactccttctcgatgccgacggtcggaatgcccagctcctcctgcaggatgtgcacgccgagcacgcgctcatagctccagaactcgcagaacttcatctgctcgtagagcacgccgtcggcgccgtattcccggcacaggtcgcggatgtaggtgcggcggccgtcggaacgcgcgcgctccatgaagcgcgggcactggctcgtgcgcagatagtggcgggcaacggcgcgcagcggcgtctccccgtcgagaatttcgatctgctcacggccgggcagactgccgtagcagtagcggtcagccacgaccatcgcaccgcagtcctcgatgagcttcgtgaacgcggggtcgtcgatctcgctgccggtcacgaccaggcgcacacggaaccacggctgcgcgtccggcttgcggcgcttgagctcggtgagcgtctgcttgaggtacggcaggatgcgcttgtgcgggcacacctgactcacgagctggatgacatgaaactcatagcccgtgatgacggggttcgccgccttgcgcaggtcgccgatctcggtcatgacgcgggaaatttcgttgtggtcgcggatcgccgcacggatcgccttgtcggagatgtcgataccgtaggtctcgtgcagcggctcgagcacgtgcacgcgcagctgctcctcatagtgatcgacggcgaagtcctcgtccgagaacggcacgtccatcatgctcatgaaaaactgcgggtttttctccttcacaaggccgagaatctcgaaatgctcgtgaccgcggtgcatcatctggcacgtctcggacgagagcagcgcgtcgagatagtcataaccgccctcgatgccgcgctcgaggatgctgcgggtgtaagagcagatcttgctcgacatgtagtacgtgcccacgtcgatgctgccggtgttcggcgcacgcaggcggctcgagaagcagccgggcaggttcagcagcgtctccggcacgaaatagcaggtgtagcccagggcgtgttccccctccgccttggcctgctgtaccagctcgttgttggcctcctgcagcagattctcaaaatagatcagatgcttcaggtctttcatggtttgcttccacctctcacagttcgtcgcgggtctccggtcttacatctggttcgaccagaagccttttgaaccaaagatagcataatttttgacaatgtgcaactggttttcgtcaactgtcccatttttatcgcttatcacaacgtatctggtcagaccatgaccagaggcctgccaacaaaccggacagtttttgcacttttccgaacaacgattgacaaggcagggcgtcagattataatatgatatggtttacctcacaacaacgccaaaggagttacacaatacatgaacagaatctacgtcaccggccaccggaatccggacacggactccatcgcggccgccatttcctatgccgcactgcgcaacgcgctcggcaaccgggattacgtggccgcacatctcggccacatcagcgatgagacgaagcgtctgctcgatcgcttcggctttcaggagccggtcacgatcagcaacgtccgcacgcaggtgcgcgatctggactttgacacgccgccggcgctcaactccagcgtcacgatggaccgcgcctggcacatcatgcgcgaccaggacatctccgccatgcccatcatcaacgaggacggcacgctctacggtatgctctccgccggcgatatcgcggcctacagcatgcgcacgatcagcgaccggcacgtggacgcgctgccgctgttcaacctcctgagcgtcatcgagggacgcatcctcaacgacggcgccgagcaggtcgaccgcgtgtccggcgtggtgacgatcgccctgccacagagctgcgacaacctgctcttctccgaccccgacagcatcattctctgcggtaaccagccggatatgatccgccgcgcgctcgacatcggcgtgcagtgcatcatcctctgccagaccgacgtcgatcccgcgtggcttgaaaacgccggcaagacctgcgtcatctctaccccgctcgatgccagccgcgtggcgcgactggtgtatcaggcgatcccgatctcccgcccgtgcaacacggaggatctggtcagcttccacctcgatgattacatcgacgacgtgcgtgaggtcgtgctcgagagccgctaccgctgctaccccgtgctcgacgagaacgaaaaggtcgtcggcacgctctcgcgctatcacctgctgcgtccgcggcgcaagcgcgtcgtgctggtcgaccacaacgagatggcgcaggcagtgcccggtctggagcaggccgagatcctcgagatcatcgaccaccaccgcctggccgacattcagaccacgcagcccatccgcgtgcgcaacgagcccgtcggcagcacgacgaccatcatcaccaatatgtatcaggagcacggcgtcatgccgtctccgaacatggcgggcctgatggcgggcgccattttgtccgacacggtcatgttcaaatcccccacgtgcacgaagcgcgacatcgccatggcagagcgtctggcccgcatcgccaacgtctcgctcaaggagctgggcaacctgctctttgccgcctcgagcgcgggcgacaagtcggccgacgagctgtgcttcaccgacttcaaggagttccacatcgccgaccactatctcggcgtcggtcaggtcacgtcgctcgactcggccgcggtgctcgagcgcaaggacgagctgctggccgtcatggccacgaagctcgagcagcagcactatgacatgatcgcgctcatggtcacggacgtgctcctggagggcacgaacctgctctacatcggcagtgacgacacgatccgctccgccttctcggtcgagccgaaggacaacgccgtgttcctgcccggcgtgatgagccgcaaaaagcagatcattcccatgctgaccgccctctggggctgaggccacatatacaaaaaaagtccgcacaggcagtgcctgtgcggacttttttgattcaatccgtcatgcgcacgatgcggtaatacgtgcgcgccgtgagcaggtacacaaaggtgtacagcagcgcaaagacgccgaacgttccgagcgtgcacagcaaaaacagatgcacgttttgcagcccgaaggcgaacacgatctgcttgatgagcggaaacgcgaacgcgatgtggatcgccgccgtcacaagcggcaggaagaacatgagcagcacctgcgtgcggatggtcgccttgacctccttcggcgtcatgccgacctgctgcatgatgcggaagcggccgcggtcgtcatagccctcggagacctgcttgtagtagatgatgagcaccgtcgcaaacaggaacacgaacccgaggaaaaagccgaggaataaaaagccgccgtacgtgctgcgcagcgtgggatagccatcggcgcgcatatcggtcgtgtaattcacgttcgccgcctcggcagcagactcaaacgcggggtcgcagagcagtgcgtgcagcgcgccgagctgctcgtcgtccgtgccggagaggtcgaactggtacgtgtagttgagcatgctgcgggtgccgccgtgctcgttagtataggcgttttgctgcgcgcgcagctcgagcacgctgtcgagatccggcatgaccagatacagtgtgtgcagacccatgatggagctgccgctgacgagcgagaagctatcgagctgccgcagccgcagcgtatcgccgccgagcgtgagcgtgtcgccaaaggctgcgccgtccgtccatgcgagcgcctcgccgggcgcaagcgtcacctgctcgccggtcaggtcggcatagccctccgtgtccagaaccatgacggcgtattcatcggcgctcgaaccggtgagctgctcgctcgtgagatcgagcgcatcgccgctgcgctgcgcggaaaacctgacggtgcgatagccgtgcacattgctctgcgtgagccccgagcgcgtcatggcatcatccaccacccgcaaaaccggcgcgacgtccggcactgtgttcgtccgggggtcggtcatgagcgtgagcgtcatatcctgcggccagcgcacggcggcataggcatccacgcccttatacaggctcaccgtggtcgagaccgtcacgagcaccatcgtcgagaggatgcagatgctcgcaagaccggccgcgttgcggctcatgcggtagatgagaccggagacggtggcaaagtggctggttttatagtagtagcgccggtttttccgcagcgccttgagcacgacgacgctcagcgcgataaacgtgagatacgtgccgatgatgacaaggatgaccgccgggaagaaattctggatggcgtacaaggccacgtttgtgcgcagggaaatgagatagcccgcggcaaggcacaccgcgccgagcagtgcgaggatccacttgctgcgcggctcgcgctcgccctcactaccggcgcgcagcagctgcacggggttcgacagatggatgatgcggatggtattgagcaggagcagcaaaaacagcgcgccgaaaaacaccaccgtatagccgatgctcatcagtctgatgttcagcccgaacgtagcctccccgccgatgagccgcatgagcacgagctgcaggagcttggagaacacccccgccgccacgaggccgaaaaacagcgccatggccgccgtgtacagcgactcccagaagagcacgtaggagatgtggcgcttttccatgccgaggatgttgtagatggcaaactcgcgcttgcgctgcttggtgaaggtgctgttcgtataaaagaggatgatggcggaaaacagcgccatgatgaacacgccgaaaccgagcacctgactgacgctgccgccgtgctgcatctgaccgagatagggatcgctcgcgagcgtgagcatgatgcaaaacagcgccacgatcacgatgcaggccagcagatacggcaggtagaaccggcggtttttcttcagattcgtcgccgccagacgcgggtagagattacgcatggtgctcaccgcccgttgccagcatcgtgagcgtgtcagagatcttctgatagagctgctcatccgagctctcgccgcgatagatctcgtggaacacctcgccgtccttgatgaacagcacgcgcgaggcgtggctggccgccttgaccgagtgcgtgaccataaggatggtctgaccgccgcggttgacatcctcaaacagacgcagcagctcatccgtcgcacgcgagtcgagcgcgccagtcggctcgtcggcaagcacgagcttcggctgcgtgatgagcgcgcgggcgacggccacgcgctgcttctggccgccggagagctcatacgggaacttctgcagcagctcggcaatgccaagctgccgggcgatgggcgcaaggcgcgcggccatctccggatacgccttgcctgcgagcacgagcggcaggaaaatattgtcctgcacggagaacgtatcgagcaggttgaactcctgaaacacgaagccgagctgcgagcggcggaaggccgcgatctcccgctcggggatggtgctcagcggccggccgtcgagcacgacctcgccgccggtgggcttatcgagcgcagcaaggatgttgagcagcgtggtctttccgctgccgctctcgcccatgatggcgacgtactcgcccttctcgaccgtgaaattcacgtccgtgagcgcctgcaccttcgtgccgccgaagcgggtggtgtaaattttctgaacatgacgaacttccaaaaacgacatgaccgttacctcctgtgtaatgacaggctcagtataaaccgccggggaaatggctgccatgcatctggcttacattttcccggcggaaacttacgattctgtaaggctcactcgacctcgagcgcgtcctgctgcaggccgatgcgcaccgtcgtgccctcgccgacggtcgaggtgatggcgatcgtgtggccgagcttttcaaggatgcggcggcagagatacaggccgatgccggtcgcgcgcttgtccgtgcggccgttgcagccggtgaagcccttttcaaacacgcgcggcaggtcctccggcgcaatgccgatgcccgtgtcgcggatgcagagcgttttcggcgcctcgagcgtgatggacactgacccgctgcgggtatacttgagcgcgttggagagcacctgctcgatgacgaacagcagccacttctcgtccgtgatgacgctgacattcagcggcgtgtactccaggcgcagcctgcgccggatgaactgcgaggcatacttgcgcaccgcctgccggacgatatcgtcgagcgcgtagttgcggataacatagtctgacgacgggctctcgagccgcagatagccgagcaccatctccacatactgctccacgctctgcagctgctcgagcagggcgcgctgctcgtccgtgtccgcatcctgcagcagcaggcgcatggcggcgatgggcgttttgatctggtgcgcccaaacggtgtaatactccaccagctcctgatagccctgctggctgcgcgtcagctgtgcgcggcggtcggcatcgagcgcgcgcacgagcgcctgatactgcgcctcgagcgcaccgtccggctcgggcagctgctcggtgctgagcgtgatctcctgctccagccgccgcagcaggcgcagacgcacggcaaagcgccggtaatcgaccgcaagccagaccagcagcaaaaacagacacacgagcgccgcataccccaccgcgcccagcggcagccggtagagccagaatatgaatgcgaacacggccgtgtaaaccgcgagcgcgatcacgaccttgcggttttcccgcacataggcaccaaacatatcttgccccctcactcgatgagatagccgaggccctttttcgtcgtgatataatccgacagaccggcggcctcaagcttgcggcgcagacgggcgatgttgaccgtgagcgtgttttcgtccacgaagctgtccgtctcccagagcttttccatgagcgtctcgcggctgacgacgctgcccttgcgctcgaggagcgtctgcaggatgcggtagtcgtttttcgtcagctcgatgcgctgcccctgatacatcaggctcgcatccgccgtgttgagcacggcgccgcgatgctcgagcgtgggcgcgggcgcagcaaaatcatacgtgcggcgcaagattgcctggatcttcgccagcagcacgttcagatcaaagggcttggcgatgaaatcatccccgcccatgttcatggccatgacgatgttcatattgtccgacgctgaggagatgaacacgaccggcacgttcgacacgcgccgcagctcctgacaccagtggtagccgttataaaacgggagcgtgatgtccagcagcacgagctgcggatcgaacgccgtgcactcggtgagcacattgcggaaatcctccgcgcagcgcacgtcaaagccccacgtcgtcaggtgcttttgcagcgcggcggcaatggccgcgtcgtcctccacgataaaaatgcgatgcatacgatcaccccaaaaagaaaatagcaggtaccgttcgtacctgctattttacgatactttgccgtcgattgcaacggccgtgtcaatcccggcggcggttgccgtagagaataatcagccgcagcagctgcgcgaacgacaccagcagcgccgcgacatacgtcatggcggccgcccgcaggacgctgcgcgcaccgcgcagctcgtcgtccgtgagcaggttgcgcgactcgatggcggccagcgcgcggcgggaagcgttgaactccaccggcagcgtcgccagctggaacaccgtcacgaggccgaagagcagaatgcccgcccagacgagcaccgaccagttgaagatcagccccgcgatgagcagcggccacgagagattggagccgatgcgcgtggccgggatgatggccgcgcggatgcggatgggcgcgtaatcggtcgcgtactgcacggcgtggcccgcctcgtgcgccgcgacgccgacggccgcgatcgacgcgacgccgtagacctcgtccgagaggcggatgaccttcgcctgcgggtcgaagtggtcggtgagcttgcccgagatgtgctcgatgcgcacatccgtgataccgttggcctgcaggatgcgctgcgccgcctgtgcgccggtcagcccgctcgtgcagcgcacgcgcgcatagcgcgaaaacgcgctcttgacctggatctgcgcgatgagcgcgatgagcagcgccggcacgaccagcaccagatacgtcatatcaaagccataataataaccgttgtacatggcagtcatcctttctgattcgtgctgctattgtaccgccaaagcgtgcgcacgtcaaccgggacaagcatttgcatattgtgtggttttttcccgaaaaaacatcccccctcggggcttgcgcggcggtcgttttttgttatacttgtgtcaaatacacgataaagagtatgggcgatccgatcatgattgatgcacacgacattcgattttcctacgacgggccgggcggccgccgctccctcaacggcgcgcagctgcacgtcgcccccggcgagtttgtggccgtgctcgggcacaacggctgcggcaaatccacgctcgtcaagcacttcaacgccctgctgccgctgcagcacggcacgctgaccgtcgacggcatggacgccgccgaccccgccaaccgctgggcgctgcggcgcaaggtcggcatggtgtttcagaacccggacaaccagttcgtgtccacgatcgtgggcgaggacgtggccttcgggctggaaaactacggcgtgccggaaaacgagatccccgcgcgcgtggccgcggcgctcgccgccgtggacatggcaggctacgaaaaccgcgcgacgcacacgctctccggcgggcagaagcagcgtgtggcgctggccggcgtgctggccctgtcgccggacattctggtgttcgacgaggccaccgccatgctcgaccccgacggccggcaggaggtgctgcgcacgatccgccgcctgcacacgcagcagcgcaagaccgtcgtcatgattacacattatattgaagaagccatcggcgccgaccgcgtctatctcatccacaacggcaaaatgatcgccgacggcacggcgcgcgagatgctcacgcagccggagctgctggccgcggcagggctcacgccgccgatgccggtgcagatgtactacgacctgaagcaggccgggatcgtgctcgcccgctgcccgctgacgctcgaggagcttgcggaggaactatgccgatcacagtaacgaatctgacgtgtgtctacggcgcggggacaccctttgagaccactgcgctgcgcgatgtgtccgtcacggtcgaaaacggcagcttcgtcggcatcctcggccgcaccggctgcggcaagtccacgctcatccagatcatggccggcctgctcacgccgacggccggcaccgtcatgctcgacgggcaggacatccacgcccgccgctatgaccgcagcatcctgcggcgcaaggtcggcatcgtgttccagtacccggagtgccagctctttgagacgaccgtggaaaaggacgtggccttcggcctgaagcacagcggcctgagcgccgccgaaaagcaggcgcgcgtgcgctgggcgctcgagaccgtgggcttctcgttcgagaaagtccacgaccagccgccgatgggcctctccggcggggagaagcggcgcgtggccatcgcgggcgtgctggcgacgaagccggagtatctgattcttgacgagccgatcgcggggctcgatccgctcggccgcgaggcgtttttgcagctcatcaccgagctcaaccgcggcggcatgaccatcctcatggtctcgcacaacgccgactgtctgggcgcgtatgcccggcggctgctcgtgctggaggatgggcagctcgtgcgcgacggcacgccggaggagatctacgccgacctcgactggatgcgcgcgcaccggctgggcgtgccgcagagccgcaccgccgccgccctgctgaagcagggcgggctggacattccgcaggacatcgcaagctatgacgcgctgctcgcggccgtgctgcgcgcgaagggcggtggccacccatgagggaacacctgaccgggcagttcactcctggcacctcgatcctgcaccggctggacgcgcgggcgaagtttttcggctttctcatccttatcgtcgccaccgtgtgcacggacgcctggctcggctatgcgctgctgctcgccgtcacggccgccatcgtggccatttgcggcctgccgctgcgcaccgcgctcgcgtccgtggcgcgcatgggctggtttttcctgctcatctttgtgatgaacgccctgtttttcgccaccgacgacgccatctggcactggtggatcctcacgctgtccgtgcccggcatcgtgcagggcgcgcaggtgacggtgcggctcgcgctcatcctcgtgatgagcaacgtgctcacgtgcacgacgccgccgctcgagatcaccggcgcgatccagacgctgctcagcccgctgcagctcgtgcggctgccggtcgaggacattgcgatgatcctgtccgtcgccgtgcagttcatcccgacgctgctcgaggagaccgacaccatccgcaaggcgcagatcgcgcgcggcgcgcgctttgaaagccgccgcctgcacgagcgcgcacaggccatgctgccgctgatcgtgccgatcttcctcagcgccttcaagcgtgccgacgagctcgccatggccatggaggcccgcggctaccgcggcgcgcgcggccgcacccgaaaaaagtccgttcccctgcccctgagcggctggggcgcgcttgcgctgtgcgcccttgtgtgcgcagcggaaatactcctgtaaatccaaaatcagaaaggaaccgaagtccgatgcaaaccatgtctaccgtcaaaaaatccatcatcaccgccgtgtgcatcgccctgtgctatgtgctgccgctgctgtttcacggcattcagggcgctggccaggtcttctgcccgatgcacatccccgtctttctgtgcggcctcgtgtgcggctggcagttcggcctgctgtgcggtctggccggccccgcgctctcgagcgcactgtgcggcatgcccccggtgagcatcctgccgtcgatgatgatcgagctggccgtctacggcctgatcgccggcatcatgatgcgctgcgtgcgcacgcgccacgtgtacgccgacctctatatcagcctcatcgtcgccatcgtcgccggccgcgttgtcaacggtctggtcaatgcgctcatcttcgcgcgcggcagctactccatggccacgtgggtcgcgggctccgtcgtcaagagctggcccggcaccgtcatccagctcgtgttcattccgagcatcgtgttcgcgctcatgaaggcacgcctcatccccgagcgctacccaaaggaggtacctgccgatgattgaacgcagtgacgtcatttcgtttttcgaccgctgcgccccggactgggacgcggaaatgatccgcaacgagccggtcatccgcaccattctcgacaatgcggacatccgcgcgggcgtggacgtgctcgacgtggcctgcggaacgggcgtgctcttcccggactatctggcgcgggacgtgcacagcgtcaccggtgtggacattgccccggaaatggcccggcgcgccgccgaaaagttcccggatgcgcgcgtgaccgtgctctgcggcgacattgagaccgtgccgctcccgcagcagtttgaccgctgcatggtctacaatgctttcccgcactttcccaatccggcgcgcctgatcgcgcatctggcgacgctgctcaagccaggcggccgcctgtccgtcgcgcacggtatgagccgcgccatgctcgaccggcatcacgcgggcgcggccagcacggtctctgtctccctcatcagcgagacggagctcgccgcgctcatggccccgtattttgacgtggacgtcgtcatctcggacgaccggatgtatcaggtctgcggcacgaaaaaataaaagaatcccttccctcttctttccccaaagcgcaaacgcccccgaaccaaagttcgggggcgttgtgcgtatcaaaaaccctcgcagagtttaccgcccgccggcggcgcacaaattctgcgcgcagcagactgcaagccttttgtcggaaaacccctgcggttttccggcagtcgaaacacccccgaaccgaagttcgggggtgctgctgttttgtgtgttatttgccgatgaatgtgctgagaatcttggccatctcggcacgggtcgtcccggcgttcggggcaaggatcgtgtcgctgcggccgcggatgagctgtgcggcgttcgcccactgcatctccgccagcgcccaggacgggatctccgccgcgtccgcatacgcggacagatccgcgcgctgcgtcgtgtcgcgtccggcaagcttcgcgtacccgcacagcatgaccgctgcctgtgcgcgcgtggccggctcgttcggccggaacgtaccgtcgccgaagccgctgacgatgccgttggccgccgcccagatcacggcgttcgtgtaccactgaccggccggaacgtccgtgaacgggttatccgccgtcacatccggttcgtccgccaagcggtagaggacggtcacgagcatggcgcggctgagcgcctggttcggcgcaaagcgcgtgtcgctcacgccgagcatgaggccgcggttatacacgcgcttgatcgcgctgtacgcccagtggttgtttacatcggtaaacggcaggaacagccccggctcgtccatatagttggcaatgaagagcacctcgatcacgtcgccgtccgagagctggtagtcttgcatggcaacgtccgggaactccccgttgacgcgaaagacccagccggaattgggtcccttgctgaactcggccactttcgtgccgtccggcttgatgacggcctgcacatagcttcccttcgcctcataggtgtagccgttggccgtgagcacctgccggaacacatccatcgccgtcgtgccctcgggctggtcgtagacgacggtcggctggatccacatgtcggtgtctgtgtgcagctggaaggtgacggtgctggtcgtgacctgcggctcgtcgctcgtgggtgcggtgccgcggacgatcaggcgcgcggaaacggcctgatggctcagcgcctggaagtcggcattgtccgggtagcgcgcggcatacttgccgagcgtctcactcgagagctcgctgacaatcgtgacggccttatgctccgtcgcgcgcgttacgagcaggttttcgtggctgatgacggccggattcgtcgagcggaacaggcgccaccgctcgctggcctgccagcccggcagctccgaggggacaatgccgtggttggcctgatcgtcaacgtcgtacacccagacgagctggccgtcggcgtccagatacgcctcgcggaaggcgtgcaggttgccggtaatgtgctcgggatcgggattgccattgcggataccgtcaaagtaatgcgccttgacctcggccataagcgcgagctcgtcgtcgatctcctgctgcgtgagcggctggacggcgatgacaaaatcgcgcgagacggcgatgccggtctccttatccttgatcgtcacggtgacggtgacggtgacgtccttggcatcctcgccgggcagcggacggtagacctccacgcgcgcggcgttgttcacgccggggggcacgatggtgtccgcatcgctgctcgtgatgatgaccggggtatacttgccgtccacgccgaaatcacccgttgtcgggaagtggatgtcgttggcggcgatgtacttgccgtcgcgctcctccaggacctcgccggtcacggcatcgcgcagaccgccataggcggcaaagcccgcgtcgagcttggcctgaagctgctcgcgcagcgtcgcctgcgattcctgcgaggcggccaccgtcacggtaaaggccttcgtcagcgtcagtccctcaatgctgttgcagacgatggacgccgtgagcgtcacctgctggtctgccgcggtgcgggtgagcgtcgtggcgtagggcgcgtagtacggcgtgtagggtgccgagccgaccttgacgatctggtcgttggcgctcgtccaggtgacggtcgcccaggtgttgaagttgtcgtacttgctgtaatcgacctgcgacgggtcgatgccttccttgaccgggtagcgcggcagcgtcagagacgtgaccggctcggtcgggagcgtgatgcgatccagctccgcctgcagcacggcctgcgcgcgcgccagatcccaggtgatgtgcacatagacttctttttccacgctggcgccgtccagactgaggacaaacgtcgcgtagaaatagctgctgcggctgctcatgccggcatcgaagtaataatggatcgtgccgtcggcgtcaatggaggccttcgcgtcgcccgcggcggccttgaccgtgacggtcacatcgtcgtagcccttggacgccagcagcgcggcaagggcgtcggccgcgttcgtatccttgccgtaggccggctcaaacgtttcgcccagcgtctgcgccgcctgcgcaaggcgcgcctcggccgcggcggccgcagccgaatagaccgtgagcgtatagtcgcgcgtctttaccgtgccgtcagtgtccgtaaccgtggcggtgagcgtcacggtctgcacgccggaggccggcagcgtgaccgtgccgtcggcagccagcaccgccggggcgctgctggtataggtgatcgtatagccgtcaccgctcgtgggcagcgtgagcgcatccgcggtgcggatggtaccgtcggccggcagcgcggctgctaccgcgtcaaacgcgatgccgaaaacatccttcgtccagacggcatagagcttgtagatctcgttgtcttcgctgccgtcgtcccagtcgccgtcttcaaaatcacggtggatggtcgcctgatcggcatacttgaccgtcgtgtcataagacgactcgctccagccggcaaacttgtagccctcgcgctggaacgtgcaggcaggcagtttgtagtccacgccgaacgggacggccacggtggccatctcgccggtcacgctgctcttgtcgctgtatcgaacgttaaattcgacctgatactgatagtctctccagtgggcatagagcgtgatctcgggttcggtgaagaccgtgtcctgcgtcacgcgctcgccgccctctttggcggtataccagccgtcgagcgccttgttggccgggtagctgtactccgacaggtagggcagattcttgccgacggcatccttgcgcacggtcttgtccgagatcttgcccttgtagccgttgccgtcaaaatggacggtgatgccctcctgccagtgcgcatagagcgtcacgggcgtggcgtcggcgaacttggtctggttggtaatctccgtgccgccctccggcgcgtcgaaccagccgaggaagatgtagcccgtgcgggtgggatcggggatctggttgtagcgggcgctgcccttttcgtagatgtagttatagttatagcccacaacgccggtgcgcacggtcggctcggagccgtcgttgcgatccaccgtcacctgcaccggctgaccggcccagacggcgtagagcttcacgacagcgttgttctccgcgctcaggttcttgacggccgcgccgtcggtatactgcacgctgctgccggaagcagaggtgttccagccgcggaagtcgtagcccgcgcgggtgaaggcgttagccgtcagcgcctgctcggcgtcataggtgaaggtctgcgcggccatctcgcccgtgccgccgttgggcaggtactgcacggtgtaggtgttggccgtccacgcggccgtataggtcgtgtcgtccgcaatgaccgtgtccgccgtcagcgcggtgtcgccggcgaaccagccgccgaacgtatagccggtgcgcgtcggctgcgggatggcgccggcgccgatggccgtgtcgcacgcgatggcgaccgtggtgtcggctgttgtgccgtcgttataggcaaaggtgacggtgtacgccggcgtccagacggcgtagagatccatcgcctccgtggggttgagcttcgcgccgtcggtgtaagcaacttccccgtccggtgttgtcgcccagccggcgaacacgccgtccgccttcgtgaaggcgttgagcttgagcgcggcctgaccgtagaaattctgcgtgtagtcggcgcccacgccgccgttggcgtggaaggtgacgaccgtggccttgcccgccgtgaagttgcggacatagacgcagtcgtcgaatttgtcgccgctgccgtcctttgcataggtcagcgtcagcaccttgccggactcggccgagagcgtgtaggtcttccagccgaggtcgccgctctctttgaccttttccgccccgtcataggtgatggtgaagtagtcgtaattgggctcggacgagaccttgtactcaaatgtgagctctgcgtctgcggtaaaggtcaactgcagggtgcttctggctctgctttttccggctccgccggacttgagcacatagtccccgcccaacgaggccactttccatttgttcgtgctgttcggggagccgggctccgtctcggcgttggccgggacgctttcaaagaagctctggaagctcggcttgtccgccgccagtgccgccggcatgaggctgaacaccattgccagcaccagcagcagggacagtaaccgttttttcatgtgtttccctcctgaaagaaaaaattctgcccgccgaaaccggcggacaggtgcagcaaaaccggccgaacgaaattccttcgttcagccatgcaacttccggttccggcagaaatgcctgcagccttcgggtattctgactgatccgctttccggcggcttcacagtgaccgactcgcggggctttgcacccacatttcccctgccgcccgaagcggcgaagactgcgcaatatacagttctgagcgtagtgtatcacaggccggaacggttgtaaatctttttccgagcgtcggcacggataaaaaaatctcctcccggcggttacgggaggagattttttgtgcggaaaaccgcacattggggggtggtcaccgggaggcggttactcccggaaaccttggagaaaaaaacagaaatggatgaaaaatagcaaaggaaaatgagatcaacggcggatgctcacgatgtctctgccaagcaggaccgtgtaaatgccgccgatcacgagcgcaagcacacccagcagcgccatcgcagcagagcccgcggagtacgtgctcataaaggagacagcgacgatctcgatcgcgagaaacgcaacgaacgcaagaatgttcagccaaatgtttttcatagcagctacctcctgaaattttttcggttctggggaggccgtcagccaatcccctcgcttacagttgcatgatagcatatcgcgcgcctgttgtaaaattcacaattccgaaaggtacgttttgcgttttcgattcaattcaaaattttgatgatattctttcacaaaaatgatattttcctgtcaatccttccctgccacctgttggataggcgaaaaaatgcttgacgcaggccggatttgcgacgtattataagctcgagaaaaaaacggaaccaaatcgggataaggaggcatcgccttatggaacttcgtttgctgaccacgtttttaaaggtcgcgcagctacagagcttctccaaggccgcagaatctctggggtattcccagtccgccgttacggtgcaggtccagcagctcgaaaacgagctgggcgtgcgcctgtttgaccgcatcggaaaaaccgtatccatcactcactacgggcaggagttcatcccctacgcgcgcgatgtcgtgtcggccgcggcgcgcgccgtgtcgttcacggtgcaggagcgcgatctgaccggcacgctgcgcatcggcacgatcgaatccatcatgacggccagcttcggagagatcctgccgctgtatcatgagcactgtccgcatgtgaacacgcagctgatcgagggcgacacgaaaacgctctcggatatgctcatgcacaatgaagtcgatctgatctacacgctcgacgacatgggttacgacgcgcagcggatcaagctgttcgagtgtccgcaggagatcgtcatcgtcgccagtcccaagcacccgttcgccgccgccaagcagctcaagctggccgacctcgtcaatgagccgttcgtgctcatgccgcagttcaacagctatcgccaccagttcgacatggagctggcgcaccagaagctgtcgatccggccgtttctggagctggagagcacaagcatggtcatgcagctgctcgagcacaacccctatctgtccgtgctgccgcgctacacggcgcgccgccgcgcggaagagggccggcttgccattctgccggtcacggactgccacatggagcagtggagccagctggtgcaccaccgcgacaaggtgctcacgccgcagatccgcgccatggtctccgttatcgcgcaggtcgagaacatcccgctgcacctcggggactgacacggcgcaaaagaaaaagaaaaatcgcccccatcgttcgatgggggcgatttgctgtctgtgaacagaaactcagtcggtcacgtacggcaggagggcgatctgacgcgctctcttgatggcctcggtgagctcgcgctgatgcatcgcgcaggtaccggtcgtgcggcgcggcaggatcttgctgcgctcggacaggaagcggcgaagcttcgcggtgtctttgtagtcgatataagtgcacttgtccacacagaactggcaaacttttctgcgtttgcggttcttgctcttatctctgtcaaaagccaagactgtaatcctcctttatcaaaatcagaacggcagatcgccgtcatcgtcgtccagctcggaaaatgcgctgccgccctgggggacattgtcatatccgccatagctgccgcgatgagccggggccgatgcgctcggcgctgccgggcgagacgtatcgccgccgtcgcggcgcttgctctcgccgaagtagacattgtccgccacgacctccgcggtcgtgcgctttccgccttcgcggtcagtccattcgcggatctgcagacggccgctcacggcggccatgctgcccttggtgaagtacttggagacaaactccgccgtgcttctccaggcgacaatgtcgatgaagtccgtctgccgctcgccgccgtcacggccgccgaaatcacggtcgaccgccagccggaacgacgccacgggaatctgggactgggtataacgaagctcggggtcacgggtcagacggcccatgagcacaatgtggttcagcattgccgtgcctccttattccgggcgacgggtgatcagggagcggagaataccgtccgtgatgcccagcacacgatccagctcggccgggaaatccgggccgctggtgaacttgacgagcacgtagtagccctcagaaatgtagttgatctcgtaagcgagcttgcgcttacccatctcctccatttcctccagcgtgccgttctgctcgacaagcgccttgaacttctcgacgactgctgcagtctcttcctccgacagattggggttgatgatatacatcagttcgtacttttcggtggtttttgccatttcagttgcacctccttctggtctagtggccctcatctcaaatgagagcaaggatcacccacgtcaacacgcaggccatattattatacctgaaaaagcgagaaagtcaatccctttttgtactttccggcgtatcgagcacgtgcacgttcatctgcgggtaggacatggacacgccgtgcgcgtcaaatgccgctccgacggcctccatgaggtcataatacacggtccagtaatcggccgttttgcaccagacgcgcaccgtatactcaatattgctctccccgtagcccgacacgcgcacgaacggcgccggctccggcaggatgccggacacgagcgacacggcgttgtgcagcgccgcctttacctgctccgggcggcaggtatagtccgcgccgaaggtcagatccacgcgccgctgcggctcgcggctgtagttgacgatcttggacgcggagaggtcgctgttcggcacgtaaatgtccttgttatccagcgtgcacagctgcgtatagatcagaccgatgtccttgacggtgccgctcacgtcgccggcctcgacgaaatcgtcgtcctcgaacggccgcgtgagcaggatggtgatgccgctcatggcgtttgacagacagttttgcaccgagagcgacaaagccaggccgagcaggctgaacacggccagcagcgccgtaacgttaaagccaagactgtcggccacgatgaggatggccatgaactccagcgcgatcttgagcaccttgaggatgaacctgctcaggctctccgacagccgcgagtgcgccgagatgcgccgcgcgacgcgcatgacgagccagatgacgagcacgcagatcacgagcgtgatggcggaggtgatgagcttttcgagcgtgagattgccgaggctgaagccgatggcgctgttcacgtcctcgatgctgtctttcgtggattcgagcgcgttctgataggtgtccgtattcaaatggcggtctcccctttcgtgcgggatttgttatctagtatacgccatgccccgccggttttcaacacgttccggcgggcagggcgttggagaaggcttgcggtggtgcctttttgcgcttttcagcgcaaaaaggcggggctgaaatcagccccgcctgcgtggtaggtaaaacttatgcctcgtcgtaaagctgcttgagcttgagcaggtgctcgtagcgggccttggcgttgacctcggacttggcgaacagctcctcggcacgctccgggaactcgttggtcaggcgggcgtaacgcgcctcgttcatgaggaagtcgcggtagccgccggccggctccttgctgtcgagcgcgaagggcttttcagcggacggatcgtaacggaagagattccagtagccgcagtcgaccgcacgcttcatctcgccctggcagttggtcatgccgcccttcttgatgctgtgcatctcgcagggggcgtagccgatgatcagggacgggccggggtaagcttccgcttccttgatggccttgatggtctgcgccgggtttgcgcccatggcgacctgcgccacgtagatgtagccatagctcatggcgatctcggcaaggctcttgctcttgagctccttgccggcagccgcgaactgcgcgacctggccgatgttggaggccttggacgcctgtccgccggtgttggaatagacctcagtgttgaagacgaacacgttcacgtcctcgtcctgcgccaggacatggtccaggccgccgaagccgatgtcgtaggcccagccgtcgccgccgaagatccagcagctcttcttgttgaggaagtccttgttggtcatgatgcgctggtagcgctcgcagtcacaggcgggcttggcctccatcacagcgaggaactccgccgtggcggtctggttggcctcgccgtcgttataggtctcaagatacttcttcgcagccgcgaccttggcgggatccttgccgttttcggcgatgtagcggatgtcctccgccagatcgtcacggatcttcttctggccgagatacatgccgaggccgtgctccgcgttatcctcgaacagggagttggcccaggcgggacccttgccttccttgttgacggtgtacgggctggtggcagccgggccgccccagatggacgagcagccggtcgcgttggagatcatcatgtgatcgccgaacagctgcgtgaccaggcgggcatagctcgtctcggcgcagccggcgcaggaaccggagaactcaagcatgggctgccggaactggctgcccttgacggtgaagtcctgaagctctttcttctcagcgaccttggcgaccatgtagtcgaacacgggctgctgatcttcctggctctcgagcggctgcatcgtcagcgcgccgaccgggcagacgtgcgtgcagacgccgcagcccatgcagtcgagcggggagatggccatggagaacttgtaaacgcccttgccggcgccgaccttgaagtcgaccgccttggtctgcgcaggcgcggcggccagctcgtcggccgtgagcgcgaacgggcggatggtcgcatgcgggcagacgtaagcgcactggttgcactggatgcacttggtgctgtcccactcgggcacggagacggccacgccgcgcttttcatacgcggaggcgccgagctcgaacgtaccgtcggcgtgatcgacgaacgcggagaccggcaggctgtcgccgtccatcttgtcgaccggggtgagaatgtcgcgcaccatcttgacggtggccggacggccggtcagttccttggcaggcgcttcgtcgacggcgttggcccagtcggccggaacgtcgatcttcacatacgcggtcgcgccgaggtcgatggccttgtagttcatctcgacgacgtcctcgcccttcttcatgtaggaagccttggccttctccttcatgtagcggatggcgtcctcttccggcataatcttcgccagggagaagaatgcggactgcaggatggtgttgttgcgcttgcccatgccgatcttgatggccaggtcaatggcattgatcgtgtagagctggatgttattcttggcgatgtagcgcttggcagaggcgtccagatggtggctgagctcctcaggcgtccactcgcagttgatcatgaacacgccgcccggcttgacatcctggaccatcttgaagcccttggtgatgtaggacgggttgtggcaggccacgaagtcggccttgttgatgtagtacgggctcttgatctcgtgatcgccgaagcgcaggtggctgatggtcacgccgccggtcttcttggagtcgtactggaagtatgcctgaacatatttatcggtgtgatcgccgatgatcttgatggagttcttgttcgcgccgacggtgccgtcgccgccgagaccccagaacttgcaggcgatggtgccctcgggggaagtgtcgggcgcgtccgtctccggcagggagaggttggtcacgtcatcgacgatgccgatggtgaactgacgcttcggcgtgtcgcgcttgagctcttcatagaccgcgaacacggaggacggcggggtgtccttggagccgagaccgtagcggccgccggtgacgacgatgtcgttgcggccggcattggccagcgcggtgacgacgtcgaggtacaggggctcgccctgagcaccgggctctttcgtgcggtcgagcacagcgatcttcttgcaggtcgccgggatggccgcgatgagcttgtcggcgcggaacggacggtacaggcggaccttcacgaggccgaccttctcgccgtgcgcgttgaggtagtcgatgacttcctcggccacgtcgcagatggagcccatggagatgatgacacggtcagcatccggggcgccatagtagttgaacagctggtagttggtgccgatcttggcattgatcttgcccatgtactcctcgaccagatccggcacggcgtcataatatttattggacgcctcacggttctggaagaagatatcgccgttttcgtggctgccgcgcatctgcggatgctgcgggttcaggccgcgctgacggaaggcattgaccgcatccatgtccaccatctcggccagatcgtcataatcccagacggcgatcttctggatctcatgcgaggtacggaagccgtcaaagaagttcaggaacgggacgcggcccttgatggcggccagatgcgccacgggggacagatccataacttcctgcacattgccctcggcgagcatggcaaaaccggtctggcggcaggccataacgtcggactgatcaccgaagatggacagcgtgtgcgacgcgagcgcgcgcgccgtcacatggaacacggccgggagcagttcgccggccatcttgtacatattcgggatcatgagcagcaggccctgagaggcggtgtacgtcgtggtcagggcgccggcattcagcgaaccgtggacagcgccggctgcgccggactctgcctgcatttcctgcacacggaccttcgtgccgaagatgttcttgcggccggcagcggcccactgatcgaccaggtcggccatcgggctcgacggggtgatcgggtaaatggcagccacttccgtgaacgcataggacacgtgggcggcagcgttgttgccgtccatggtaacgagctttcttgccataaacttcatctcctatttctcttatatgttatcctatattcgtgcaatgggcacctatccgcccattcacgtcaataggataacacagtttcaaaaaaacgtaaataatagtttttttgattcttgtttcaattttcgaaacgcaactattgaaaacgtgcaagtttccgggtgaaaaccggcgttttcacggaaaatgtccagttttttcgctaatttttcgcttgtgatttctcacctattgttatataatatatcactgctgttaagaaaggggctgtctacatggtcaaaatcgaacaatcgaatggcaccatcagcatcaccaatgaagtattcaccaaccttgcaggcgacgccgcgaccagttgcttcggcgtgaagggtatggtcggccgcagcaaagacagcggaccgttccagctcctgcgccgcgaatccatgtccaagggcgtcaacgccacgttcgccgatgacggcagcatctcgctcgagctgcacatcgcggtcgatcacggcgtgaacatttccgcgcttgcccacagcatcatcaacgaggtcagctacaaggtcaaccaggcaactggcgtccccgtggcgcgcgtggacgtgtacgtggacaccatgttcctcgattaagcggggacatttcgcactgcttcccacccgggagccgcgcttccgggccattttcattccccctgtcggaggtgtacagatttgagagaaatcattgatgccgcagcgcttcgggaaatgctcctgtgcgcaaacgcggcactagaagaaaacaaacagaagatcaacgagctcaacgtcttccctgttccggacggcgataccggcacgaacatgagcctgacgatgaactcggccgccatcgagctcggccgcaagcagaccgacaccgtcggcgccgtggccgactgcgccgcgagcgcgctgctgcgcggtgcgcgcggcaactccggcgtcattttgtcgctgctgttccgcgggattgccaagtccctcaagggccgcgagactgcgagcgcggcggaatttgccgccgccgtctccgccggcgtggacgccgcctacaaggccgtcatgaagccggccgagggcacgatcctcaccgtcagccgtctgggcgcgcaggccgccgtggccttcgccaaggacagcacggactttgagggcatgctcgatgcgctgctcgccgccgcgcgcgaggcgctggccgacacgcagaacatcaaccccgtgctgcgccgcgcaggcgtggtcgatgccggcggcgagggcttcgtgctcgtcatggacgccatgctcggctatctgcagggccgcaccgccgcccccgtgacctccgccgctccggctgccgcgcaggcgccgaaagagggcgcggacttctccgagttcgacaccggcgagatcacgttcggctactgcacggagtttatcgtcgcgcgcgagaacagcaagagcccggagctcctgcgctcgttcctgaagaatctcggcgactgcgtcgtcgtggtcgacgacgacgagatcatcaaggtgcacgtgcacacgaacgtgcccggcgaggtgctgaccgaggcgctgacctacggcccgctccagaccgtgaagatcgaaaacatgcgcaaccagcacactgcgctctccggcaaggagaccgaggccgaagctgccgctaaggcggaggccgagcccgaagtggccaagcccgaaaagcagttcggcgtcgtagccgtgtctgccggcgagggcatggcgaatctcttccgcgagctgggtgtggaccgcgtcgtcaccggcggccagaccatgaacccctccacagaggacatcctcaccgaggtcaacaagaccccggcggaggtcgtgttcgtgctgccgaacaacaagaacatcatcatggccgcccagcagtgcatcccgctgtcggacaagaaggtcatcgtcatcccgaccaagaccgtgccgcagggcatcaccgcgatgctctcgttcgacccggcgagcgccgaggacgtcattgaggcggagatgagcgccgcgatcgagagcgtgcacaccgcgcagatcacctacgccgcgcgcgactccgactttgacggccacaacatccgcaagggcgagtatctggcgctgatggacggtgcgctgctcggcagcaacgccgacctcgacaaggtgctgaccaagattgcggacgccgccaacgatctcgaccccgagatcgtctccatctactacggcgaggacgtgcagggcgacgctgcccagcacgcggccgacctgctcggcgagcgcctgccgatggcggacgtgaacgtcgtcaacggcggccagccggtgtattactacatgatctcgtttgaataaaacgtgcaccatcatacagcaaagcgcccggacgaaatgtccgggcgctttgccgtgtttccgcttttctgcggcagcgcgccccggcctcagccggggcgcgccgttgtttttttattgttcctgcgcgcggatgagattcttgtagaaatcgaccgcgccgggcaggcagctatattcgatgttctcgttgatgccgtgcatgcccttcatctgctccgggccatagatcacgggggcgaagcgcacgcagctgtcgcagatctcctgatagaagtgcgcgtccgtcgcgccggtcatgacataggggctgacgggcaggccggggaacgtctcgccgatgacccgctccacctgacagaacgcctcaccgtggatgtccacgggctcggagtagtcgttcgtgtgcacgacctccatctccaggccgtgcttctcggcgagccggcggatgatggccagactctcctgctcgccctgatgcgggatgaagcgcatgttcgcgcccagcgtcgcctcctgcggcagaacgttgtacgcatccgaaccggactgcatcgtgaacgcgatcgtcgtgcgcagcatcgcgcccgcctgcgccgacacgcgcggcagcacgaccttcatcagcggggcaaacagccagagattgcccattacgagccgcaggccaaacggcgcatacggcgccaggcgcgtgaacatggccgtgacctcgggcaggaacttcttgcggaacggcgcgtgcttttccacatccgtcacgaacgcggacaggcgcgcaatgggggtgttcgccgtcggggcgctggcgtggccgccggtgctgcgggcggtgaatttcacgtccgccttgcccttttcaaacacaccgaccatggcgaagttgccggggatgccgccgatcggctcggtgatgatgccgccgccctcgtcgcagacaagaaacggccgcacgccgcggcgcttgagctcggcaacgagcttcggcgcgccgtcgcccgcccactcttccgtgcacgacgaggcgatgtagacatcgttggccggctcgtatccggcggcgagcagttcctcgaccgcctgaaaaaacgccatgaccgagcacttggtgtccgacgcgccgcggccccagaccttgccgtcggcaatgtcgccggaaaacggcgcgtgctcccacgtgccctcggcgggcacgacgtcctgatggctcatgagcacgatcggacggtcgtgcgcgcggcccggccagtaatagagcaggttgccgtcaatgtccgtgcgctccagcttttcatgcacgagcgggaagagcccggcgagcagcgcgtggaagcgctcgaacttttccggctcgcggacgttggcgtaggatgtggtgtcgcaccggatcatggccgagagcttctcggcgtaggccatggcgcggtcgggatccggctgcggctgataagcggacgttttgcgcggtgtgagcgcagcgtgcgccacggccgcccccaacggggccagcggcgcaagcgcaagacaaccgggacggaatttcatttgacatctgcctcctttttctgcttgcggtacatactgtaggcaatgccgatggccaatgcgccgctcggaatgatcataaagctcgtggaactcgtcagcgacgggacgagcatgaacagcaggctcatcacgaccagcggagcgacggcgacctgcacgttcttgcggaagtactgatacgccatcgcgccgaagagcgccgggacgacgttggcaaacgccggctggagcacggggctctgcagcacgggctgcagcggcacgagcagcgccacgccgagcgcgagcacgacgatggtcacgagcgaggatgttgcgatcgagagcgtcgagatgatctcgttttcggccgtgccggtcttcgtgccgacgatatcgcgtgcgttgacggcacacgggatcttcatattgatgaggttgccggtgatgaaggcgaggtagccgccgccggcgccgagcatgggcgtgtagatgagaaactccgccacgctgctgaccgtccacacgaggccgacggacaaaaagcccttggcgacggcgcccatgtcgggcatggcgccgaggaacgtgccgatgagaaacggcgcgccgacgagcagcacgagcgtgatcgcgctcacgatgcggccgaggacgtgcgtccggcggttgaactgttcgagatatgctttgcgttcggtttcgttcatgatgttccctcctcacagccgcacgagcacggccgccgccatgccgatgagcatactgccggcgatagagaagctctccagccaggccatgttctttttctccgacaggtacacaaacagcgccatcaccgcagccgacacggccacgacgatcagcggcgtccagtcgccggtgcaggtgaacagtccctcgccggacacgaacgcgccgatgtagctgccgatgtacgcgcacacgaggccgatgaacatggccgtcatggcgctgtcgccgaagccgacgccggaggcggacttggccccgtcgttgccgaggcgcttgaggtagcgcttgttgaaaaagatcgacaggatcatgccccacatgatgcacacgctcatgagcagggcgatcgtcgcgaagccctgcggcgtcatctcggcggcggacagggcgtgcatgccgacctgctcggccgcagcctgcgcgacctgcgtctcataatgcagcgcgccgatgacggacaggcgcagccacggccacggcgtgccgaggctgccggacagggcgatgacgccgagcaggatgcccacgctcggcaagacagagaacgtggcgctcgacgtgatggcgcgcttcatgcgcgcggggtcgatgccgatggcaagacccgcgcggtaagagcgcacgaggaaaatgacgcacaccaccgcaacgaacgcgatgatgccgccgcagattgcgtacatgggtacgctgttgagctgggccaggatgttgttcatagacgtttctcctctccggcggatgccggtctctatatggaaaggcccgcatggcagcgccatgcgggcttttcacagcttattgcgcgccgccgaccggcccggacacggccgggcggatattggatgcggtcaggtaggactgaaacagcagaatgcccgcgatggccgccagcatgagctgctgcccgccggcgcggtcatccggcagcgccgtgatgcacaggaaggccgcgaactggctccagaaaatgctcttgattgccttcgggcggccgtaggcgaagccggcaaactcataagacgcgatgagcgcggcgcacagcgccaggatctcgaccgcgtaggcagagacggtggggttgatgatattaaccttgtagctcacgatcagccagaacgcgagcagcacgatcggcatggacgcgcacacgaccgcgccggacgccgtctcgacatcgccgggggcgagcatctgacgcgcgaacgccgcgccggccgcgatcgccagcacggccaggacccgctgcagccccggcgacgcgagcgtgccgctgccaagcagcagccacaggccgccgactgccagcaatgcgccgagcacgatgccgccgatggtgcgcacacgcggcgacgcggcaagcgcagccggaagcgaatccggaaaatacgtatgcggctggtttttcatccgaaagcacaccacggccagcacgaccgcggcgatgacgatcatcagcgcgacggcgtacggccagatgctgccgcgcacggcaaggccggtctcggcttcaaaacagacctgatcctgcagccagcggaaaaaggtcccgaacgctgccagcacagccgtgcagcagcagattacccaagcatttttgcgcataacaaactacctgtcccaatacatattgaatagacttattttatactgatttgccccctgcgtcaaggcgcaaaacgcctccgcagggcagaaaggaggcagcgcacgtgcgcaaagtttttctgctgtcactgctgctcgtggtgctctcgctcgtgatcccgtggctcgtggtcacgctcagcccggcccaagagccggcggtgcagcccatcccgtccgtgacggcgtcggccgccgtcgcgcccgacagcgagacggccatcacggcgctcagcggcggcgagctcgtcgagacgacgatggccgactggctgcccggcgtcgtggccgccgagatgcccgcgtccttcgcgcccgaggcgctgcgggcgcaggcggtcgccgcgcgcacgtatatcctccagcgcatgcgcggcgtggcagccaaccacccggaggccggagtctgcgaccagtacacctgctgctgcgcgcacaaggacgacgccgcgctgcgcgagcaatggggcgcggactatgcgcgcaacatggcgcgcatccgccaggccgtgaccgacacggacgggcagtacctcacctacggcgggcagctcatccgcgcggtgttccacgcctcgtccgccggggcaaccgagagcagcgccgcgctctggagcggcgatgcgccgtatctcgtgagcgtgtcctcacccgagacggcgcaggacgtgccgaactacgtctctacggccgagatcgcggccgacgccgtgcgcgcggccgtgctcgacagctacccggactgtgtgctcggcgacgatccgggcacatggttcggcacgccggagctcgatgacagcggccgcgtggcgcgcatccccgtcggctccgaaacgctcacgggcgcgcaggcgcgtgcactcttttccctgcgctcggcagcgttttccgttgcctacagcggcgggatgttcaccttcaccgtcacgggcagcggccacggcgtcggcatgagccagtacggcgcgaacgtcatggccatccgcggcagcggctatgccgacattctcgcgcactactaccccggaacgacgctcatccgcgcggatgggtagatgaagaaaagagacgttctgagaacgtctcttttcttcgttgatcgtgcaatttactgcatcgtttcgtccgcataggtgttctcgtccacatagtagaccatcacggacgcggtggcgagcagctcgcccgcatcattgaacacctccgccgtcacaaggccggtcgtgcggccctccttgacgacacggccgtgcgccacgagcttggatgtgtccttgcccggacgcagaaactggatgctgctgtcgagcgtcacggtgatgcgcccaccggtacgcgcagcaacgccggtcgccacatcgcacatactgaagatcagcccgccgtgtgccatgccgagcgggttcatggcgtcctgcgtcatctcgacttcgacgacgctcgtgccttcgccgacctcggtgacaacgatgtggttgtgtgaattaaagccgtaaaacgtgttgtagcgaaacgggtcacgaaatgcgctcaaatctttctgtacttggttctgttccatgctggggtacgcctccgcctgaatgctttatcattttttacattaagacgttatcgtaccacgttcgcgcgttttcgtcaaaacaatttttccgtcgtgcacctccgccgtcacgacatcgccctgttggagcgtgccgtcgagcagcatgcccgccgcctgatcggcgatcgtgctctggatggcccggcgcagcggccgcgcgccgtacacggggtcataccccgtggccgagagcgcatcgagcgccgcgtctggcacctgcagctccacgcccgcgcgctccatgcgcgtgttgaccgtgtcgaggagcttctgcgcgatctggcggatgttggcgcgcgtgagcttgtgaaagacgatgatgtcgtcgacgcggttgagaaactccggccggaacgtctttttcaggtcggacatgaccatgctgcggatctcggcgtccgtgcgcccggcgccctcgctcgtctgctgcgtgaagccgaggctgcggcggctgtccgtgatggccttcgcgccgacgttcgaggtcatgacgacgacggcgttgcggaagttcaccttccgcccgagcgaatccgtgagctggccatcctccatgacctgcagcaggaggttgaacacatcctcgtgcgccttttcgatctcgtcgaacagcacaacggaatacggcttgcggcgcaccttttccgtgagctggccgccctcctcgtggccgatatagccggggggcgagccgatgagccgcgagacgctgtgccgctccatatattccgacatgtccacgcggatgagcgccttctcgtcgccgaagagcgcctcggccagcgcgcggcagagctccgtcttcccgacgccggtcgggccgaggaacagaaagctgccgatcgggcggttcgggtcgccgagaccgacgcggctgcggcggatcgcgttcgagaccgcgtgcacggcctcctcctgcccgacgacgcggcggcgcagcgacgcctccatctgcagcagctgcttgctctcgctcgaagtgatgcccgcgacggggatacccgtccagagcgaaacgatctcggccacgtcctcgcccgtcacggcgcgcacggggccggcgtgcgtctgctcccactgactgcgcagctgctcgagctccgtgcgcagcttctgctcgcggtcgcgcaggcgggccgcgcgctcgaaattctgcgcgcgcacggcgttttccatatccgcggtcgtgttcgtcagctgcatctccagcgcgtgcacccgctccggctgcacgagcgcctgcatgcgcacgcgcgaggccgcctcgtccacgaggtcgatggccttgtccggcagccagcggtcgccgatatagcgcacggagagcgtgatggccttgcgcagcgcatcgtccgtgatgtgcaggcggtggtgcgcctcgagccgttcgcgcagaccgcgcaggatcagcaggctctgctccggcgtgggctctgcaatgcgcacgggctgaaagcgccgctcgagcgccgcgtccttttcgatatacttgcggtactcctcgagcgttgtcgcgccgatgatctgcagctcgtcgcgcccgagcgcgggcttgagaatgttcgccgcgtcgatcgcgccctcggccgagcccgcgccgacgatcgtgtgcagctcgtcgatgaagagaatcacattccccgctcgctgcacctcgtgcaggacgcacttgacgcgctcttcaaagtcgccgcggtactttgtgccagcgagcatggccgtcaggtccacactcacaatacgcttgttgcgcaggtcctcgggcacgttgccgtccgaaatgcgctgcgccagcccctcggccaccgccgtcttgccgacgccgggctcgccgatgagcacggggttattcttgctgcggcgcgagaggatctggatggcgcgctcgatctcccggtcgcggccgatgaccgggtccatcttcccgccggctgccagctccgtgaggtcgcggccgtactggtcgagcgttttcgtgtcggcggcgcggcgcgtctgggaccgcggggccgactgctgcggccggggcttatactccggccggccgaacacgtccatgatgtccgtgtagatcttgttcaggtcgccgccggccgccacgatgatgcgcgcaccggcgctgtccgcctcgcggaggatgcccatgaggatgtgctccgtgccaacgtaacagtgaccgagccggttggcatcctcggcggctagttcgatgacgtgccgcgcccgggggctgagcccctgctcgggcgcgccgggcacgccgcggccgaccgtctccgtgaccatgcgcgtgagcacggcgtccgtcagcgcgttatcggtcagaatgcgggcgccgagcccctccccctcccggatgatgccgagcaggagatgctccgtgcccacataactgtgccccatgcccagggctgcgtcgtgcgcctttgtgatcgccgtggatgcccgctgtgtaaaccgttcgctgccgcgcatagatcgtttgcctccttcgctggtcatacgcctctattatcccccggccggcacaaggaaactgccgaatccgggaagctgatttttattatttccaccccttcctgtattttaatcaacatgcttttccgaatttcgaaaatgacggttgatttttcggatttttgtgctacaatgactccataccagaggaagagaagtctggtcaaaatcataggaggtaattacaatggcatttgttattggcgacgattgcgtcatgtgcggcacctgtgctgcgaactgcccggctgaggcgatttccgagggcaatggcaagtacgtcatcaacgcggacagctgcatggagtgcggcacctgcgctgccaactgcccggtgggcgcgatctctgtcgactaattcgaccgagaacaacgcaaacggatgaggcgatatgctccaggcatatcgcctctatctatttcagacgattttcgcggaaggagcggatgccatgcccccctgcgtacaatatgacgatctgtggccaggcgggccgcggtttgcgcgctccggcgccgggttcgccctcggcacggacagcgtgctgctggccgatttcgcggctgaccgccgcgtgcgccgctttgccgacctcggctgcggcgccggcgtgctgacggtgctgctgctgcacgcgctgccgcaagcggcggccgtcggcgtggagctgcagccggacgcggcgcagctctgccggaacaatctcgaggccaacggcctgaccggccgggcgcagatcctctgcgccgacctgcgcgagcaccgcgcggtgctcccggccggcagctttgacctcgtcgtggcaaacccgccgtacttcgccgcgggcagcggctatacctcgcccgaccccatgcgcgcgcacgcgcgcgacgagcgcacctgcaccatgcaggacatctgcgccgccatgacctatctcacgcgctggggcggctcggccgcgctcgtgcaccggccggagcggctgagcgagctgctgtgcgcgctcacggccgccgggctcgagcccaagcgcctgcgcaccgtggcgcacacggcgcatgcggcgcccagcctcgtgctggtcgaggcacgccgcggcggaaagccggggctcaagctcctgccgccgctggcactgtgcgcacccgacggcacggactcggaagagatccgcagaatttatcacaggaggacgtgactatgagcggaacactgtatctggtcggcacgccgatcggcaacctcggcgacctgtccgtgcgtgcactcgagacgctgcgcagcgccgacttcatcgccgccgaggacacgcgcgtgacggcgaagctcctcaaccattttgagatcaaaaaaccgtgcgtgagctactatgagcacaacaaatacgccagcggtgagaagatcgtcgcccggctgcttgccggtgagacgtgcgcgctcgtgaccgacgccggcatgcccgccatctccgaccccggtgaggacatcgtgcgccagtgcgccgagcagggcatcgacgtgcaggtcatccccggcccgtgcgcggccatcgcggcgctggccgtgtccggcctgccgacgcagcagttttgcttcgagggcttcctcgccgtgagcggcaagacccggcgcgagcatcttgagcgcctgcgcggcgagacgcgcacgatgatcttctacgaagcgccgcacaagctgctgcgcacgctctgcgacctgcgcgacacgttcggcggcgcgcgggagatcacgctcgcgcgcgagctgaccaagctccatgagcaaaagctgcgcacgacgctcgacggcgcggtggcctacttcaccgagacgccgccgaagggcgaattcgtgctcgtgctgcgcggcgcacccgagcgctcggagccggtcgtcacggccgagcaggcgctcgagatcgtggcacgctaccgcagcgagggccgcgcgctcaaagaggcgtgcaagctcgccgcggcagacaccggcttcggcaaaaatgagctgtatcagatggcgctcaacgcctgagcccccgcagacgataaaaaaagtcccctgaccgacggtcaggggacttttttgctccgtgctcagagcttctcgttcatggcgcggatgcagtcggggcaaatgttcttgcctttgtagttgatgatgtctttcgcgttatcacagaagatgcaggccggctgatacttgcgcaggatgatggactcaccatccacgaagatctcgatgcggtctttttcctcaatgccgagggttcttctcagctcgatggggagcacgatacggccgagctcgtcaacttttctcacaatgcctgtggacttcatggtaaatgcctccaatacgaatggaataaattgagaaagattcgatcattcatttcaacacctgcattataccaaacgttgacaaaaagtcaacgaattcgcggcaacttgtccgatgaattgcgtttttctaccatttgtatatttttgcatgcttcaaattcatctgttttgtgaataatcaccgaaaacataaaattttttaatcatcagcgaccacgccaaatcgtcctaacgccgtgcggcaaaacatatactgcactggttgcccgtgccggcgccggccgcacacagccggacgcagcgccgcggacaaccgcagttttcaggaaaggacgcaaaggcatggcattgacctgggtctgggtaggcatggtgtgcgtggcgctgatctacggcgcggcgacagggcagagcgcggccgtcggcgcggcggcggcgcagggtgtgcagcaggcggtgacgttttgcctgacggtgggcggcatgatctgcctgtggtccggcgtgatggaggtcatgcggcgcagcggcatcgcggccgggctgtccagactgctgcagccggtgctgcggcggttgttcccgcgagcgtcgcgcgatgcacagacgctcgacgcactgagcatgaacgtgagcgcgaacctgctcgggctcggcaacgcggcgacgccggccggcgtgcgcgccgcacaggcgatggcgcgcgagctccggggcagcaaagccagcgacgagctgtgcctgctggtggtactcaacacggcgtcgatccagctgctgccggtcacgatcgccgcggtgcgcgaggcggcgggcgcggccgtgccgttcgatattctgccggccgtgtgggtgacctccctgtgctcggtcacggtcggactgctgaccgggaagtgcctgtcgcgcgtatggcggtgagcgacgtgttggcgctgaccgtcccggcgctgctggccggtgtggggctctacggcgcgctgacggggacggacgtcttttctgcgctgacggccggagcgctcgacgggctgcggaccgtggtgcgcatcttccccgccctggtggcgctgctggcggctgtgagcatactgcgcgcttccggggcgctcgatgcgctcacgcgcctgtgcgcgccggtgctggcgtggctcggcatcccgccggagacggcgatcctcatggtcgtgcggccggtcagcggcagcggcgcgctggccgcggccagcgacatcatcggcgcctacgggcccgattcccgcatcggccgcaccgccgccgtcatgctcggctcgaccgagacgacgttctacgtgctggccgtgtatttcggcgcctgcggcgtccggcgcagccgctgggcgatccctgccgccatcgccgccgacctgaccggctttctcgtggccgccgcgctcgtgcgctggatctggggcgcatagcgccgccgacaaattgcacaaaagcgcccatctggactgatattttcttgacgaaacgcctattttgcaaaaattcgcacttttcactttacaacgccgcacgaatgtgttataaaataatcacgttagttaataaattaactcaacgttcttccgatttctttcttttctcttcttatttttgctctctcgacagcagcgtgtcgccactctccggcggcacgctgttgccgtttctgtccggaagcgcaaaaatgccctcccccgcgtgcgcggtgggagggcatttgcttgtctcaaaattccggtcacattttttccggtgcggtcacgccgatgatatccagaccgatctcgagcacgcggcgcgtcgtgtcggccagcttcaggcgcgcgtcgcgcacggcgggctccgcgtccttgatgcggcagacattgtagaaccggtggaagcgcgcggccagctccgtcacgtagcggttgatgcggctgggatcgtaatcgcgcgcggcaaggtggatctcctccgggagcatggcgatctgcttgatgagctcgtgctcctgcggcgtcgtgagcagggccacgtccacatccgccgcagcgggcacggcgcagccgacctcggccatggcggcgagcagcgtgcagatgcgcgcgtgcgcatactggacgtagtagacggggttttcgctgtcctgccggatggcgaggtcgaggtcaaactccagatgcgagtccggcttggcgttgaagaaaaagcggcaggcatccacgccgatctcgtccatgaggtcagcgagcgagagcgccttacccgtgcgcttggagaccttgacgatctcgtcgccgcgcatgaggcgcaccatctgcatgatgaggaagtcgagcttgcggccctcgagccccagcgcgggcgcacgcatggtcgcggcgaagcgaatggcgtggccgtggtgatccgcgccccagacgtcgatgacgcggtcaaagccgcgctcgatgaatttgttgcggtgataggcgatgtcgaccgcgtagtacgtataaaacccgttcgagcggcgcaggacctcgtccttatcggcgccgaggtcggtgttgcgcagccagagcgcgccgtccttttcatacgtcaggccggcgtccacaagcagctgcaccgtctcggtcacgtagccggaactgtgcaggctgctctcaagaaaccactgatcaaaatggatgcggtagcgctcgaggtcgcgctgcatacgcgcaatgttgtacggcaggccgaaggccacgaacgccgcgcagcgctcggcgctcggcatggtgaggtacttgtcgccgtcacgctcgtagatcagtttggcaagctcccggatgtcgtcgccgtggtagccgttgtccgggaattccacggcgtcctcgccctggatgagctgaagatagcgcgcctcgatggacttgccgaacaggtcgacctgattgccggcatcgttgacgtaaaactcgcgccagacattgtagcccgcgcggtcgagcacggacgcgagcgcgtcgccgagcacgccgccgcgcgcgttgccgatcgtcatgggcccggtcggattggcggatacgaactccaccatgaccttttccccgtggccatcgtccacgcggccatagtccgcgccggcttcgtccacggcagtcagcacgtcctgataccacttgtcggacaggcggaagttcaaaaagcccggccctgccgcctcaacggaggcaaaccacgtgccgtccaactccatgtgcgcgatgagcgcctcggcgatcttgcgtggggccatgtgcatggtcttggccgacgccatggcgtggttggcggcaaagtcgccgttggcggtgtccttcggctgctcgacggagccgcgcacgtccgcgccctcgggcagatcgcccgccgcggcggcgcgcagatatgcttcccggatgcacgcatccacggcggcgcgtgcctgttcgattcgattggccataatcagttaccccctattctataatcttattgttctcggacggtgatcttcagctggttgcggttggcgcaggcatggtcaaaatccacgacatacaacagatccagcaccccgccgtgctcgcccagcgtggagcggtagcgctgcgtctccagcccgaccgtgctggtgccatacggtgtctggtacaaaaacgtgttgcgcgcgccgggggcaaagaccatccggctcgtgacggtgccggtgcgcttgagcacggcgctcgacggcgtgaaagtgatggtcgtgagcgtgccggccatgccggtcagctcgctctcgggataggtgagcaccccgcagccgtcgacgcaggtatactccccgtcggtcgaaaactgcaccagctcgtccggctcctgctcgaaaacatcggcctgggagccctcgatcgtgataacgacctgcatacgccgcctcctttgcataacagtgcgattctattatcatatactgttttgtccaacttcgcaacagaaaaatggtgtagaatttcccgccgccgtttgctataatggtagcacaagcgcatccgccgccgaccgctgcggatgccagccatttttcgggggcgcaggctcccgtcgggagggatgaccggatgaacatagaactcaccgacaaggagttccggcggctgctggatctcgtctacatcggcaactggatcctcaactccacacgcgagaaagaccggtttgaggattacgatattttgcaggaaaagctctttgcgcagtgcgccaaaaacggcatgaacgcgctcatttcccgctggcaggggcacattttcccctcgcccgcctacgaaaacggcggcattcacgaggccatcgccgactatgaggacgccgtgtttttcgacattctggccgaggagctggcgcggcgcgacctgggctgtctcgacagcgagcccgccgactataccgagctcaacgcccgcatggatgaatacatggacgaatttgaaaagtccggcgtggaaaatctggtgctggagacatgagcacacgcaccatcgaaacgcccatcggcctgctgacgctccaggcggacgaagccgccgtcacggccatccgcttcggcgcggacggcgcgcaggacgcctcgcccctgctcgacgcggccgaggcgcagctgcgggaatactttgcgggcacgcggcggacattcgacctgccgctcgccccgcgcggcaccgcatttcagcagcgggtctgggcggcgctgcgcgccatcccctacggcgagacgtgcacgtatggcgagctcgccgccgccatcggcagcccgagtgccagccgcgccgtcggcatggccaaccaccacaacccgatcccgatcgtcatcccctgccaccgcgtcatcggcgcgaacggcacactcaccggctatgccggcgggctggagattaagcgaaagctgctggcgctcgaggggatcaccattttaaaataagcaacatatggaaaaatgaccgccagcaagactctttgctgcgccccgcgagcagtcccgtgttttatctctgccgctttttttcttcacgagcgccatcggacttctttggctcgcataccgaacgagcggttttcgacatacaaaaaaccggtacatagtacatcaagcatacatttataaaaaacaacaagcgtctccgtgcatgccgtgcggaggcgcttgttgcatagttttgcgcgcgcgcggccatactgtgcgcaggagatgaggacaatgcgcatgagcaacgaagaatatgcggcgtttgtcgattcgctctcgccgcgctcgcccatctggggcgacctgctgcgcgcggggctggtcggcggcgcgatctgcgtggtcggtcaggcactggtgaacctgtatgaacactggggcgcatcggcggtcacagcggcaacgtggtgctcgatcacgctggtgtttctcggcgcgctgctgacggggctgggcgtttacgacgatctggcgcggttcgccggggcgggatctctggtgccgatcacggggtttgcaaactccgtggtgtccccagcgctggaattcaagaccgagggcttcgtcacgggcacggcggtcaagatcttcacgatcgcagggccggtgatcgtctacggcatcagcgcaagcgtgatctacgggctgatcctggccgtcttcggactggtctgacaaggaggaacacatgaaagaagataaacgcggcgggcgcaagcccgcgcctgtgccgaccgggcacgatcagcgcgcggcggcgcgcgaccacagcgtcccgcacggcaaccggaaaaacgacgccatcccgccgagcaaggcgcacgcgccggacggcatctccggctactggggataagcgcacccatctcgaatgggatcgtttgcttttgtctatgctccgcaagccggaaagccgctggcagtcggcagccgcctcgaatgggattgtttgcttttttctgcgcacggcgcaaagtggaagcccgtcgtcaatcggcggtaacttccaatagacgcccccccactcccgcggaaacttctgagcagcgggggagctcgagggggcgaagcgcccgcctcgaatgggatcgtttgcttttttctgcgcgcggcgcagaaaaaagcggccgctgatcgctcagcggccgcttgcgggatttacttagaactcggtcgtaaccggtttgcgggtatggaactcatggaggacattgtacagccagccaacgagcttcatatccagattgaactggtacacggtgaacagagcgccggaggtagccagcaggatggtgagaagcttcttcaacagtttcatgtaatcgtctccttacttcttggcgagacccttctggcgagcgtactcggcagcacccagagcgcccatcagctgcgggtcggtcttcagctcaacgactttgaacttcagcacgtgctcgatggcctgcttcaggccggcgttcttcgcgcagccgcccgtcagcgtgatgctgtcggtggcgccggccttcttggccatgacgaagcagcgcttggcgacggccatctcgatgccggcggcgatctcgtcggtcggcttgccttcgcccacgagggtgatgacttcggactccgcgaaaacggtgcactgcgccgtgatcgggatgacgttcttcgccgtcagggacaggttcgagaactccggcaggctcatctcgaaggagcgggccatggcctcgaagaagcggccggtaccggcggagcacttatcgttcatcgcgaagctcttgaccgtgccgtcggtgtcgatgctgatgcccttaacgtcctggccgccgatatcgatgatggcgcggacttccgggttcgtgacgtgcacgcccatggcgtggcaggagatctcggagatgttctcgtcggcgaacgggaccttgttgcggccgtagccggtgccgatgaggtaagcgagctccttggagtccttcaggccgaccttgtcgcagacttcctgcatcgccgcgatcgcggactgctccgcattgatcttgctgcggatcgtcgtgtcggcgcacattttgccgttctcgtcaagaataactgccttcgtgtaggtggaacctacgtcgcatccgccaaagtatttcatagtattacttcctcctgaatgtttttaatgtccgatatacgtttatacgttcaaatgctccgaattaccaggtgacctcgtcatcgatgtcgatgagggtggcgtcgaccggctccgcgtgcatgacgttgaccatgtagttgttcacacggccgcgcatgtccttacgggaaacggtacgcggatccatcaggtcgtgctcgacccagatcaggtggataccaagctcacgtgcctgatcgtcgaacaggccctgcaggccggccatcgtcttgcagcagacgtgctgatacatgatgacgacgttcgcgttgaagttctcgcactgtctccacagctcgcccagaacgtgatcgtggccgccgttggtgtggcgacgcatgaccatgcgctcgtacagacggcagaggtcgttgatggcctcttccttgtcggtggtgttgagcatcttggtcatgttcagcgcttccatctcggtcagcgcgtaaatgccccagcagttggccagccagttggagaagttggcatagaagtgggccgggcagctccagatgagcgcacggtacttctcatagccgccgacgtaagcgggcagcttcttctcgtaggtctccatcatggtcttgcagatcttgcgctgcgtcttcaggccttcggggaacaggccgccgtccatctcgtagttccacttacggaacagctcgaaggaggaaccgaccagctgcggatagtgggtcttgttgatctcccacttctccatctcgagccgggtgcactcgttcatcttctccatggtggcgaagtaagtgtcccagttccaggtctcgccggtgaggccctcgacccagtggatgcagtccttcatgtcggcagccgccatctcggtggtgtcctcgtcgtcgtaacggacgggcatgcacagcgggtagctcggcatgaacttgctgaagcggcgatcctggaaggacgtcgccatgacggaaccgtcgcacggcatggaggaggcgatgaagccctggccgcacatcgggtactcgtccttgaccgcgcagccgcactcagccgtcggcagcgggcaggtatcggacgggaggccgtagctctcgatggcgtcgatgtacgggatgagggtcagctggtccatctcggagaccatgaagaccgggatcatctggtacgggatgccgagcaggttcgggaagccggccatcatctgcgccatcgtcatttcgtcgaacatgatgatgcgcttgttgatcttctggttgccgccgatcttcgcgtccgccatgatgaggttggcgatcagatcctcggcccagtgggtaatggcgacccacatatcaaagtcagcctgcagcagcttgccgcggcggccgaacacgctgcggtcgaccacagccggggtggccaggtaggaagcgaaccagtgatactcgaacacggccagcataatggacatggggtccttcatgaccatgttgagcatgccgccccagatcttcagccagccgacaaagtcgtagccgacgctcttgaggcccttccactcacggcgggcaaacgcgatggcgtctttcttatacagataaccgaggtgacggtcgccgttcatgagccaatcgatcttggcgctggtgtccatggcggcgaattccttgaactcggccgtaatgcggtccttatcgcgctggaggctcagcttggtcttcgctgcgacctgggaccagtcgatatcctggatcatgcccttccagaccttcaggtcggaggggacatttttcttcatccatgcaatgttacttttcagcatttatttgtcctccttcgcagccttatgaatctgcttgatctcaaggctctcgacaaaggcctgcagtctcgtgcggagctgaccggaggagcgagccatatacgggcggtcgatggacaggaccggccagccatactcttcgttcatgatatggcttgccagcgcgcgctcgaatgcccagaaatcgcagaacttcatggattcgtagatgatgccttcggcaccgttctcggtggcgagacggttgatcgtgtcgcggcgctcctggatcttctcctggctcatgtagcgcgggcactgcgtggtcttcaggtagtgggcgcagatctgcgtgaggacgtcgtccgtgtcgttgagctcgatgacttcacggcccggcgtgctgccgaagcagaaacggtcggcaacgatcatcgcgccggcgtcttcgaccatgcgggtcatgtcgaggtcgtcgatctcggagccgatgagggccacgcggcagcggtaccacggcttggcgtcgacttttctcttcttgatctctgccagcgtctccttcaggtacgggaggatcttgctcttcgggcagcagtaagtaaccaggttgaggacgtggaattcataaccggtgatgggcgggttctccagcttgcgcatatcgccgatctcggtgatgatcttgcagacctcgttgtgctccttgacggccttgcgcagcgccttgtcggacgtatccacgccgtaggtctcggccagcacgttcaggaagcggttgcggatctgcttgacgtagtgcttgagggtgtagtccttgactttgtacgggatgtcgcagtgggtaacgaacatcttcttgttgggcatgtcgggggcagcgaccagctcgatgttctccatgcagcggttcatctccgcgcaggcgtccacaccagcgatggcgtcgaggaagttatagccgccctcgatcgcacgctccacgagtgctctgcagtactcgcaggtgtagttggacatgtagtaggatgcgatgtcgaatgaacccgttttcggcgcacgaagtctaaccgagaaacagttgtctacgttgaggaccacttcgggcatgtgatagcaagtgtaagcgatggggtgcataccctcatccttggcctgctgcacgagctcgttgttggcgctgtcaagaaggttctcaaagtagatcagatgctttaaatccttcaaatgttacacctcttcttcccttttttatggttttcgtttgattgggctcgccgggggcgttcccccatggtggtcacggacatggaaaccgtcgctgtgtctccggccgaaacgtgcggttcttcaaagcgtaccacccttatgtaacacttcaaagcattccgtccaaaaacgcaaggatagcttccgttatcacgtcaacagattaacatattcgcgcacaatttacaagtcttttatcacatatgggggcaaaaaattgttgattcttacaagaggatatgataaacttttgataatccattcagagcagggtgatttttccgcacggcggccctgccccacttcagaaaggagtgtttcccatgcacgaacatgaacacgatcacgatcatgcacatcactgccacccgcacagccacgagcacaccggcgataagccgatgagccctgaggaagtgctggcgctgctgaactatatgctcgaccacaaccgccaccacgccgacgagctgcacgacatctgccacgcgctggaagatgagggcaaggccgaggcggccgcggctctggccgaggcgctgcatgcatttgaccacggcaacgacaagctcgaaaaagccctcgagcttgccaaacaggcataacgggtaaaaaggagcgaacgaccatgtgtctttctgatgcatatgagatcaaggacggcaaacagaaccttgtctgctcgcgcgtgtgcaacgtgtccgccgacggcgagaacgtcacgctgaccgacctgatggggatccgcaagatcgtccccggcaaactcaaaaaagtggacctgatgagcaacgtcatcctcatcgagccctgctgaaacgaagctgccagccggcgcccggaagatctgggcgtcggttttttctatgcgcgggaagcaagttttccttgcattttcctgccctttcctttatagtatggggaatctgcggaaaaagggacgtgaagatatgggtttttgggaactggtcgtgctggccgtcggcctgtcgatggatgcgttcgccgtgtccatctgcaaggggctggcattgcagcgcgtatcatggaaggaatgctgcatcgccggggcgtggttcggcggttttcaggcgctcatgccgctgctgggctatctgctcggcacgcagtttgagcagtttgtcacctccgtcgatcactggatcgcgttcgtgctgctgggcatcatcggcggcaacatgatccgcgaggcgctgtcaaaggacgaggataagctcgacggctcgctggcgttcaagaccatgctcctgctggcgatcgcaacgagcatcgacgcgctcgccgtcggcatcacgttcgcgtttctgcccggcacgcgcatcgtgcccgccgtggcgctcatcggctcgatcaccttcgtcttttccgcagccggcatccggctcggcaacgtgttcggcctgcgctacaagagcaaggccgagtttgccggcggcgtgatcctcatcctgctcggcacgaagatcctgctcgagcacctcggtgttttgtaaaaaaggccctttttactccacgatcctgcccggattgtggagttttttcacgctttttgcgtttggagacaagttttcacacccgcgcgaatatgttgaatcagcagcaaaaatcctccaattcagggaagtagaaaacggaaaatctgcacaacaattcctttcacatttgttgaaaaaggcaatttttttacgccggaaaaagatttggccggtttctcttgcgattttgtgaaatttaagatatagtttaggtcaagcgttcggtattagactgaaaaatgcttaaatgagtggaggaacgacatgaaaaaagtattactcacgatcatcagcgtctgcctgatcgctgcgagtatcttcggcctgttcgccggagtgagcagcttcagcgacatcatgaatgtcaaagagtacaaagaaaaggacgccaaagagggtctggagtccatcgacacgctcgatgccggccttgaccagctgcaggagaacgagggcacgtacctcgccggcgtggacacctacaccgccggcctggtctcttactccgagggcaaatcgacgctctccgcgggctacgccgcctactacgccggcaagaagcagctcgaggaaggcaaagccgcctatgccgccggcaagaagcagatcgaggacaacaccgcggcctacaacgaaggcaaagcgaccctcgccaagatcgagccgctcatgccctacgtcgaccagtacgtgaagttccgcaacggtacgatctccaacctcgccggcttctcgagcgcccaggcgtggttcgtctccgtcgtgcgtccgatcgcggccagcaagggtctggtcattccggacgatgtcaccgacctgccggcttacgtccagcagatggtcgcggacggcaaagcgcagctcaagcagtatgaagacggtctggcccagctggccgaggccgaaaagaccatcgccgccggcgaagcgcagctcaaagacgctgaaaagcagctcgctcagggcgaagtggatcttgccgcaggcggcaacaagctggccgacggcaaaaagcagctcaacacctttgaagacggctgcgcgcaggtcgccgccggctgcgagctcctgatgagccagcctgcttacatgaacgacgaaggcaacggcgacaagaaaatgtgcccgagcgttgccgacatcctcaaagagcgctacggcgacaacttctccatctgggagctcgatgacaacggtgagatccgcgtcgtcaacggctgccagtacctcaacctcgaaaactgccgcgccgttggtcaggccggccgtgactacatctccgtctaccagaccgctgccgtcacgaaggaagtcatgagcagactcggcgtcgtcgccgcgatgctcatcgcgtccgtcctcggcctcatcgccggcctgttcggcatcctgtccgtgatccgcatcagcaagggcaagatcgtgaccgcctccgtctgcggcatcatctccgccgtcatcgccgctgccggcaacgtcatcggcatgctcaccggctacaccggctacacgttcgcctgccgctacggcgaggctcccgaccctgtcacctacgagttcacgggtcacacccagttcgtcgcgatcgtcattctggccatcgttgcgatcctgtttgcgatcatcgcgtgtgtcgtctccggcgcttataagcgttcgcagaaagccgttgccgatcaggctgccgccgctgccgctcccgtggcagctccggtcgctgagccggtcgccgctcccgccgaggacgacaagaccgctgagtaaaccacagcatcaacaaaaaatctccggagtcagactccggagatttttttctgtattgtccgaaccggcgttcccggtgcggacattttgtttttctgaaaagcaggttcacagccagagctctgccgtgacgaactgccgccccttgcgcgacatgccgcccacttccgtgacgctgcccttgcccgcgccgcgcagcgacagcacgtcgccgggcgcgaccggcgcatccggccgcaggcactcggtgtaattcaggtgcaccgcgcccgcgcggatctgcgccgcggcgctcgtgcgcgaaagacggaacatcccgctcacgacggcgtccagccgcgccgactgcaccgtgaacgtcacgggacgcaccttccgctccggcaccggcacggcggccagctccacagccgccgccttcacgcccgtgcggcccacctgttccagctccagcagcgccggcgcgacgctcggcaggcagaacacatacgcgccgtgctcctgcacgagaatgtcgccgacccactcgcgccggatgccgagaccgaggatcgcgccgagatagtcccggtggccgggtgcaccgaacggcgccgaaaagtgcacggcgcacaggtgctctgctgggtcaaagtcctcggccgcgaggtaaaacggcaggaaaaacgccgcccgccgctcacagcccgcgtcgccgccgtgcagcacgagcgtgcagtcacggtgacgagcccagttcgtgagcgcgtactgctccgccggcgtcagaaacgccgtggacgtgaccgtcgccgtgcgctcgcagcgctcggccagatcggccgcgcggcgcagaagatcttcctccattgccctcacctcccgttgatgtcgcggatggcggcctcgagctgctgcgccacctgcgccagctcctgccggaactcgcgcgcgctcatgcgcagcacgcccgcgcgcagtgccgtgagctggatgagcgcgtcggacgtgacgacgcgcacggactcgtttttgccgatctcgtcggcgagcttttccatgtaggcgtccgctgtctcaccctggcgcgtgaagaccacgtgcaggccgctgcggtcgaacttctccccctgtccgccgggcacgcggtagccgtcgaacacgaccacgacctcgcggcgcgtgaaggcagcgtagttgctcagcgcgtccatgagccgctcgcgcgcggcgtcgatgtggccgctgtcggccagggcgcgcagctcgtcccaggcgaagatgacgttgtagccgtccacgatcacgcgctcgcgccggggatggaacagctccacgcgctcggtctcgtccgcgccgggcgcggcgttgcgcacgggggcggcatactgcgcgcggcggatcgggccgaactcgcgctgcaggatctcctccagctcccggtcgtcgagatcgaagcggcggcggaacatgcgcggcgcgggcgggggcgtctgcgtctccgccttgccgaagccggtgtcgatgtgcatataatcgcgcacgcgatcccacgggatgaccgtacccgcaccgtgcgcgcagaacacgctgtccggcgtgttgtcaaggtcgcgcgtggggtcgtaaccgctctcggcgatgacctcctgcgcgttgtggcaggtgtcgtagcccgcgacgctgcacgagatgcgcccgcgcccgcgggtgtaggccgcgacctcggcgggataatcgcgcatcgtggccaccggcgcgcggccggtgagcacggccatgtcgccgtgcgtctcgggcgaggaaaacgtgccggacatgaggcgcacgtcgctgatcgcgcggccgatctgctcggccgggacctcgatgcgaaaggcgtagtacggctcgagcaggacgctttccgcctgcatgagcccctgccgcacggcgcgccacgtcgcctgccggaagtcgccgccctcggtgtgcttgacgtgcgcgcgtccggccagcagcgtgatcttcacatccgtcagcggcgcgccggtaagcacgccgcggtggcacttctcggccaggtgcgtgaggatcaggcgctgccagttgcggtcgagcacgtcctcgctgcaggcggtgtcaaacgtcaggcccgtgccgcgctcggcaggctcgagcagcaggtgcacctcggcatagtgacgcaggggctcaaaatggcccacgccctcgaccggcgccgcgatcgtctcctgatagaggatgcggccggaatcgacctgcacgtccacgtcgaaccgctcgcggatgaggcttttgagcacctcgatctgcaccgtgcccatgagctgaacatggatctcgcgcagcgtctcgtcccagacgatgtgcagctgcgggtcctcctcctcgagctggcgcaggcgcggcagaaacgcgcgcgcgtccacgtccggcggcaggccgatgcggtaggtcagcaccggctcgagcgacggcggcatggacgccgccgcgctgccgagcccctgccccggatacgtctgcgtgaggccctgcacggcgcacacgcccccggccgggacggtctccgccgcgtcaaacttctcgccggagtagagccggatggcgttcaccttctcctgcacgggcgcgtccgccccgcgggggaaatacgtcagcggcgcgcgcacacgcagctgcccgcccgtgaccttcagacacgtgaggcgattgccctgcgcatcgcgcatgatcttgaacacccgcgcgccgaattccgccggatactccggcggcgctgcgtagcgcgtgagcgccgcgagaaaggcgtccacgcccgtgagcttcagccctgagccgaacaggcacgggaagagcttacggctgcggatgagcgcgcgcacggtctcgtccggcagcgcgccggtgtcaagatactgctcgagcgccgcctcgtcgcacaggacgatctgctccgggtcggggtcggtgaagtccacacacgcgccgctcaggtgcgcgcgcaggtcggccatgagcgccgcacgttccgcgcccggcaggtccatcttcgtcacgaacacaaacaccggcacgcggtagcgccgcagcagctgccagagcgtttccgtgtgcgcctgcacgccgtccgtgccgctgatgacgagcacggcatagtcgagcacctgcagcgtgcgctccatctcggcggaaaagtccacgtggcccggcgtgtcgagcagcgtgaccgccgtgtcgcccagcggcaggcgcgcctgccgcgaaaagatcgtgatgccgcgcgcacgctcgagcgcgtgcgtgtccaggtgcgcgtttttgtggtccacgcgcccgaggtcgcggatcgcgcccgtgcggtagagcagcgcctcggacagtgtcgtcttcccggcgtccacgtgcgccagaatgcccaaaaccagttgcttcataagcacctcgtgaaaatgcaagaataaaaacagtataccacaaaaacgcgcccgcggggaagtcccccgcgggcgtgtctgcgagaacccggcgaagcggttctcgttgggcggcgctcaccagatgttgtccgggtacttgcccgcgtcgcgcagcgcgcgcagcgccgcgaccacatccggcaggtcgtcgtgatacgtcacgccgtgccaggcgtcgttcgtgtgcagcatggtgacgtccgccgtgccggcgcgcagctgcgcgtccacgatcgacgggacgaaatactcgcacttgagcgggttgcgcggcaggttctcgtcc

SEQ ID NO: 13956 - DNA, 1273 bp, Unknown
  gut microbiota DNA sequence
gcgcaggtacagcggcgaaaagccccagaagttcatggacaccgtcgtatcgcccggcaggtcgatgaagtgctcaccgtcctcggtgtaggcggcgtccgcgccgcgctgctcgatgtgcgtgcgctccgtgatgctctcgagcatgccattgcgctccgtgcagacgccgcgcgacacgctgccgtttgccgtgacggtgttgcacaggcggaagcccaccatggcatacgaccgctcggggcgcggcacggcgagaaaatcatacagcaggcggtaggcctcgatgccgtaataatcatcggaattgataacggcgaacggcccgtcaatctcgggcgcagcgcacagcacggcatgggccgtgccccacggcttcgtgcggcccgccggcacggcatagcccgccggcagcgtgtcgagcttctgataggcatagcgcacgtcgaacgccgcggccacggccgggccgacgctttcacgaaactcctcggccgtgtcctccttgacgacgaacacgaccttgcggaagcccgcgcggtaagcgtcaaagagcgaatagtgcagcagaaaatggccgtactcgtccacgggcgtcgtctgcttcggccctccaaagcggctgcccatgccggcggccatgatgaccagacagggttgattcatcgtttttccctccatatttccaaacgggtctgtgccattataggccgcgggtcacaatttgtcaatttgccgcgcggtcatcttggcttcccgcgcagaatatggtatactgcttgctatcttgacagtttggacgggaggagatcatcatgccccagaagatcggcacgctgcggctggcactgacgtttgccgggtgctttctcggcgcggggtacgtgtccgggcaggagctgtggcagtatttcggcgcgttcggtgcgcgggggcttttggggctcgtgctcgcggtcgcgctgctcggcggcaccggagtgctgctcctgcggctgagcgcgcgcaccggcatcgagacgatggacgcgctgatcgtgcgtgcggacatcccatggctgcgtacggtcgtcggcgtgctgacggcggcgctgctgttcggcgtcgtgtgcatcatggccgccggcatcggcgcgctcggcgagcagatgctcggcctgccggtgtggctgggcgcggccatcgcgtgcgtgctcatcgcggcggcggcgtatttcggcctcggcggcatggtgtcggtgttcacggtcgccgtgccatgcatgatcgtggc

SEQ ID NO: 13957 - DNA, 14909 bp, Unknown
  gut microbiota DNA sequence
gggcatccggctgcaccgcacggggctgaccgccgcggcctttgccgccggggatacgaaccccatgctcggcaactgggccacgagcgccgtgaactacgcggcctacaactttttcgccaccgtgggcatcctcgccccgctgacgcgccacctgaagaaacccggcaccgccgtctggggcacggtgctcggctgcgtgctgctgctggcggtcgcgctcggcgtgctcgccgcgctggccgtgagtccggagagcgtcggggcacagttgcccatgctcgacctcgcctgccggctgggcacagccggcgttgtgtacgccgtgctgctgtttctcggcatgttcggcacgagcgtgtcctcgctcgtggccgtgctgacctacgccgggcagaagtccgcgcggctggccgggcaccgcacggccctgctgctcgtgctcacggccgccgccttcgccggaagtctgttcggcttcggcgacctgatcggcaccgtctacccggtctacggctatctgggcatggccgccatgctgctcgtggccgagcacgccgtgcacgcgtggcgcgcgggaaaccactgcgccgcaactggagattgacccgcagcggcagacctgatacaatgaaggcaatgacaaataccgcgttttctggaatttttacaggaggaaccgcaatgaaacatctcaaaaaggcgttttgcctgctgctggcggccgtgatgctgctggcgctgggcgtgccggtcatggcagcgggcgagatcccggtcgatgccgagcacttcccggatgcggcgctgcgcacgtacgtgaccgattactgcgacacgaacaaggacaacaagctctccgcggccgagtgtgcggccgtacagtgcattgacctgtttgaaatgcagatcacgaaggtcgccgacatgaccggtatcgagcacttcacgaacctgcgcgagctgctcgcgtgcaacaaccagatcacgacgctcgacctgagcggcatgaccaagctcgaaaagctcgacgtgtccggctgcgacaagctgcagagcctgaagctcgccggctgcaccgcgctcacggcgctcgacgcctcgagctgcgcgctcacggcgctcgatctcacgggctgcaccgcgctgaaaaccgtcgcgtgctcgtataacgacctgaccgcgctcaacgtgtccgccgccgaaaagctgaccacgctcgagtgcagcgccaaccgcctgaccgcgctcgatctgagcgggcacaaggcgctcaaggtgctcacgtgcagtctcaacgatctggctgcgcttgaactgacaggctgcaccgcgctcgagtcgctcgactgcagcgacaacgcgctcgccgcgctcgacctgagcggctgcaccgcactcaatgccaccgcgcagggcgacggcaagaccgcaaacccgatcctcagcccgcagtacctgccggagcagaccggcgccgtcacggacgggcagcagtgcaccgtgtacctggacgccatcgtcggcaagaacaacatcggcagcgttgcgcgcgtgccggacgcaaactacgacaagcagaccggcgccgccgtgtatgccaagacgccggactatttcacctatcagtacgacaccgggcgcaagggcctgccgtccatggccgtgtattttgagatgcagaacatgacgaccggcgtcgcgctcgatgaaaaggcgttcccggatgcggccttccgcaccctgctcgccgagaccgccgacgtcaacggcgacagccggctctcggcgctcgagctgcgccacgtgtcggagctcaactgcagcaacctcggcatcaccgacctgaccggcatcgaatacttcacggagctcgtggcgctcaactgcgaaaacaacaagctcaccgcgctcgacgtgtcgaaaaacacgcacctgagtgagatctactgcggcggcaaccagctcgccacgctcgacctgaccggtctgcccatcaaggactccgagaccgacaccggtcatgtgcagaccctgcccggcagctacgcgctcaccggcacggaaaacggcgtgggcctgtttgacctcagccagatcgtcggcaaggacaacatcggcagcatcaccgccgtcaagggcgccagctacgacaaagagaccggcatcgcgcgctacagcgccgctgtcgaaaagccgagctacacctacgccaccggcagcagcgccgtgtcgctcaccgtctcgttctcgctcgatatgagcaccatgcccaagtctccgtttacggatgtcgtcgccggcagctggtacttcgacgcagcgctctatgccagcagccacaacctgatgcttggcacgtcccccaccgagttcagcccgaacatcaccatgacgcgcggtatgctcgtgaccgtgctctaccgcatgaacggcagcccgagcgtcagcggcaagacgccgttcacggacgtgaggaccgacgagtggtactccgccgccgtcctctgggcctatcagaacggcatcgtcaccggcatgtccgacaccacgttcgacccgataaacaacgtcacgcgcgagcagatggccacgatcctcttccgctacacgaaaacggccgccccggacaaggccaaagcctccgcagacctgagcggttttgccgacgcgggcagcgtgaatgactgggccgtggacgccatgcgctgggccgtcgggcaaaagctcatcgccggcatcaccctggagcagtccgtctatctgcagccgcgcggcaatgccacccgcgcgcaggccgccaccgtcctcacccggtactacgcacagtaagcgtaccggaaatccaaccggagaaggagttttcaccatgtccagaacgaagttcatgggtatttttctcatcattctcggcgtcatcagcgtggtcgtgggcatcgtccgcggcgacatgaccagcagcgccgcgatgttcatcggctatctcgtgccggcgctgctcggcgccatgatcctgatcgtcgaccacatcggcggcggcgagagcaagaccgagaccggcccgtccgatgcgacgctcgccgggcagaaaaacaaaaagaagaaaaaatgagaaaaagccgctgcccggccgggcagcggctttttcacgcaaacatgttccgccggacattcccgtccggcggaacgcatagggttaggatgatatggtgctcagcagaccttcggctccgggaatttggagtggaagctgttggcctcgacccagtcgatggcggcctgaatgccgtcccaggtagcgggctcgccgcggccgacggtcgccatggtcaggcaggcctgctcggcaggcgtgagcgtggtcttggcagccttcgcgttcaggcgcttggcaatgtccttgatcttcaccttcatgatcaggcgatacggcagcggcagacgcttcaggtcaaagcggccctgcagcgggaacaccgcaatgtcggtgccgaggccgttcttcttgcggcagactttctccgcgttggcagccggagcacccatgccgaccgaaaccacgccgaccacgttatagcgctccttggccttgttcaggccaacaaccttgccggccagcagccagccgatgtagaccaccttgcggccggtcgggcagatgtgcgactgctccgtaaagaacggaacatgcagcgctgccgacatacggtgcgcgtactcctcacaggaaccggagagcgaagaataaacaatcgcgtcaatcatcgtgaaaaatcccctttcagtttgtggcggaaccaactgtgtccctagtttccttgctttatcatagtcaaatcttaaacaaaagtcaagattcactttccgaaattggcatagatatccggcgtttgggtagaaaaaggtacataattccgccgttttcgcgcacaaagagaaaatgcagtcattttccctgcgcgcacctcttgcagattgccggcagattcagtataatgtagaatggtttgataacaagattttcaccctgatatggaaggcggtgcagatcgcacatggaagaacgattccgcaatctggactatcaaaactggaaacctgtacgtacactcggcactgactcctacgggacggtgtacgagatcgcgcgcgacgacggcttcggcatggtggatcacgcggcgctgaaggtgctgtcgatccccgccgcgccggaggactttgacgccctcgtcgccgagggccgcacgccggaggaagtgaccgccctgctccaccgccaggtggaggcgatcgcgcggcagctcatggcggtcgatgccatcagcgatgagccgaatctgctgcggtgcgaggatcacgtcatccgcgcgcacccggacggccgcggctgggacatctatgtgcgcacggagctgctgccctccctgccggactacctgcgcaaccatccgcacggcgaggcggacatcatccggctcggcgccggtctgtgcagcgcgctggagacgtgccatcgacgcggcatcgtgcacggcgatatcaagccgcgcaacgtctttgtcggcggcggcaacttcaacgagcaggtcacgtataagctcggcgacttcggcatggcgcagttttccgccgtggacaacacaaacgatttcatggcgcctgaggtgctgtgcggcgcggaggtctcgcccgagagcgacctctattccgtgggcatggtgctctactgggcgctcaacgagcggcgcatcccgttcgtgccgctgccgccgacggcggtggaggcctcggatcttgcgatcgcgcgcgagcagcgcctgcgcggcgacccgctgcccgaaccgctccacggcagtcaggcgctgaagaatgtcgtcatgcgcgcctgcgccgacgatccggcccagcgctacgcctccgtggaggagttccgcgcggccctgctcgccgtggcgcgccgcgccgcagcggcccagccgcagcaggcacaggccgtccgccgggaagcgcccgcccccaaggccgtcgccgcggacacattccccggctcgaaaccaaaggcacagcgcaaggccgtgccggtcgagtccgggggcgcggaaaaaccgcacaatgcaaagaaaaccatcgccatcgtgctcggctcgctcgtcgtcgtggcgctcgtcgtgctcatcatcgtcatggcgctgcagggcggaaagtccggtgtcgactcgatcacgctcgatcacgaatcggccgagatcgctccgcaggacaccctcacgctcaaggccaccgtgctcgacgccagcgggcaggagctgacggacgaaacgctcacctggtcgagcagcaacgccgccgtcgccactgtgaaggacggcgtcgtcaccggcgtgaccgagggcaaggccaagatcaccgtcaaggccggcaagcgctcggccgactgcacgatcaccgtcacgaacgacgccatcgaggtcaagagcctcaagctcgataaggaccgggccgaaatgcagatcggtgactcgctcacgctcacagcgaccatgcagcccgcaaacgccccagacgatctcgtctcctgggccagcagcgatccgaacatcgccaccgtgaaaaagggcatcgtcgtggcgacgagctccggctccgtgacgatcacggcctctgccggcagctgcaccgccacgtgccagatcacggtgcaggcgccgtcgcgcgtcgacagcgtcacggccgagaccgcttcggccacgctcgatctcggcggcacgaagaccggcaccatcacgttccacatccacgggcagaatctggacagcctgcaaagcaccgtgaaggtctatgcggccgacggcagcgtcgtctcgctcggccagccggtacgcaccggcaacggcacggacgatacctacagcgtcacggccacggccgccgctgccggctccaccagcgtgatcctgcagatcaccggcgccgacggcacgacgcactccgccgcctgcaccgtcaccgtcaaggagagcaagaccatcctcgacctgatccccggcgtgaacggatgacccaaacagtcacacggccggcagggcaaatcgccctgccggccgttttttaaactccgtttaagaccgcgttatgatttgtttcatccagtgccgtatcctgacggcgtccggtcgggagaacaggccacaccgttcccgcactgcgccggcacaaagaaaccgcttctcttccctatctctcatgcatacccccccagcacaaggcccggctgcacatctgtgcagccgggccttgtacggtcagattcggtttttccgctcagtcgatgcggatgtccgccacggagtagacggccgcgcgccgttcatggccgcgaccatctcctccgtgaccggcaccggccgggatctccagccgccacgacatgggataatcggcacaggaattgacaggcatgggcgcaccttctttccacacaatcataaaattgtgcggtgcgtttggcaagccgcaaatttctctgccaaacaacagaaacgcacgaaccggggcatcccagcggatgccccggtctttctttgcattttttcagttttcccagcggatctgctgcgtgtccacgagcggatacgccgtgagctgcgcgctgtcgaggtcggcggaatggagcttcacgccggtgatctggcggttatcataggtcgtgtagtaataaatgccccggtccgcgttgcagcagctggaatagagcgtgatctcatactggccgtcatccagctcgcagcagccgcgctgctgctccacgctcgtgaggatgtggaaaaactggctgacgctcgcgtcctccgtctgcgccgagcgggcgttggcgcgcacgaacgccgcgcgcacaaagcgcgagggcgacgacaggtcgcccggcagaccgagcgcgcccatgccgcggctatcgagcgtgacgggcacgccgccaaaatcggccggcggctggctcgggctcaggcgggtgtagttgcgcagcgcggccagctgctgcggaaacggcgggttgttcgtcagcaccccgaccgggtcgtcatagacgtgcaggccgtccgccgtggcctcgaccacgatgcagccgctgcggtcggcgacgagccagtgcagctgcgcgcacggcagctcgggcgcaaacggtgtgttgtccacgaccacgcgcgcgagcgcattgcgtgcctcggcgaccgtggcgcacgtgccgagcagccacgggatgagcgcgtactgcggcaccgaggccacgccctgcgtgacgggcgggtagaccgcgttgcccacaaagttcagccccgcgatgcacaggcccttctcgttgaccgcgtcgtaatagagcgggtagtcgttttggatatgcgccatgccgatcatggcataatgccggtcgagcgcgccgccgtgcaggcggatcgggtagttgcgcggcatgatcgtcacgtgctcgccgtaggaaaattcgtagtccagattgcggccgaaataaaaatcgccgttgcagtatgtcgctgcggtacacatgatgcaaaacctccctcattcattcgctgtccagtatatccgccgcgccggggcgaatgttgaagaatctgaaaagttcctgtgtccagtctgtgtcttttatgtgcctgatactgccgtggaaaaagccggcagcatttatttgctgccggctctcttgatattgatttgattgtgaattccgctatagcgccatttgtcgtacaaaaaccattatcgtaaaaacgacagcgagtccccactctgtgatgcattgcacaatgctaagtaagtgcttagaatcaatgataatcaatatacagtactggaaaacaagaatcgcgacaagccacgaaaaatcagtacagatgctcataatcacagactcgaccagaatcacaacccacgccgccatctgcaccgccaaaagcacgcgttgactgcgccgccggaaagcatacttcacttccgctatggtttgtctggcgtcgctcgcgatccaatgcagacatttccgaatcgtttgcttcatcttgtgcttccctttcattcgtccgcgtcatacttataaattctcagaacggacgtggtatgattgagccgctttccaagtggctgcggcaatttgcttaccagcatgcgcagcagcttatcagagtatggaacgataatccgttcatgccggacggaactgcagatctggttgatcctgtgctgatacttcagtgggattttttgcttgctgatataaatccagaactgcttggtcgttcccacgtcgatgcccaattcccggatttccggataagggatatagatccgccgtttgaacggagctttgagcagaacgccttcctgcgtcagatataacaccccaaaatactgatacgaaaaatgaaaagagaccacgtagagcagcaacaatatcacggcggaaaacacaattaggaacaagtcagaatacatattcgcgctcataccttgtgtgcgcaacgcatctaaaaagtctggaacatacagtttgaaacatttcaagtacagcactactgttgtgatggtcaaataagcaataaccataacacttacgccagaaaacaagtgatattttgagatggagctatctttcataaagtcaacacctccttatctttttgaaaacagtaggttgtacatccaggtcagcgcaccggcagaatcgagcagagcagtgacgtcaccctacacgctgagaatgtagcagcacaggatagagaccgccccgtttttcgagatgctgcgaatattggatatttaaaaacaattcaaccgaatttcacatccaacggaaccgtttttcagctgatccaaatgatcgcagaagttcatgagcaaaccatattctgtccgaacgaaaaagcagcagttgtgcttgctgtagtctccaccgtcgtccagctccgcaaacacttctatcgcgatatgtcccagcgcatcttctcgaaagaagcgaaaagatacgcacgctgtagaagcgtctcccctctcttcgtttgcccaaaatccttctttattcccgttgagaaatttcgtaatttcggaaatcaattcatcaatcaaagaatctgagacgtatatttcagaggtggcagtgattatgggagaggaacactcaactgtcagttcaatcacatcatcgtcttgccatattttcctgaatattatattatccttcattgtaaaaccctcattttcactacggcttaaatttgagatcatcacatattttcaaggctcgatcatagacccgagaagtcgcaaagagcgcaaaaacgaaaccgataaactgcgagcccagcgcagcgggccgcagttgaaaaggaggagcaagggagcgcagacgaaaaatccggcaactcgttttgagctgccggattttgaacggagcggacttcgctccgatgccgtggtgccgcttggctgcggacgcatccgcaagctgacaccccgtgagtgctggaggctgcaaggtttttcggacgatatgtttgaccgggcagccgccgtcaattccgacacccaactttacaagcaggcaggcaacggcgtaacgattcccgttgtgtatgcggtcggcaagcggatcgtggaaattcaaaacgagctgaacaaggaggtcctatgagaaaacgcaatgttcacattcaattctggctagacaagaaagaggccgaggcgtttcagaagaaggtcaaaaagagcggactatcccgtgaagcgtatcttcggcacttggtaaacggccttgaaccgcaggacgccccgccgcccgactattatgccatgatgcgagagctccacgggatcggcaacaacctcaatcagatcgccgcaaaagctcataccctgaacgcactggatgtgcagcggtacgacgaaaactgccgcaagctggatgaagccgtcaaggcaatcaccgcagcggtcattctgccccgcccgatgaggtgacgcttatggcgacgacatcaatatggcgggtaaaaggctggctcggcaaggtggtgatctatgcggaaaatcccgaaaagacggcaacccccaaattctacgccgaccgggaactgaccgagcaggacgggcagcagctttctgatgtgatccgctatgctgtcaattccgagaaaacacaggaaacgggcagtgaggacgacgcaccgctccaccgcttcgtgtcgggcatcaactgctctcccgccactgcccgtgatgaaatgctggctgtgaaaaagcggttcggcaaggagaacggcacagtggcctaccacggttatcagtcctttgcccccggcgaggccacgccggaactggcgcatgagatcggcgtaaagctggcgacccggctctggggcgaccgctatcaggtgatcgtcgccacccaccttgacaaagaaaatcatctgcacaatcactttgtcgtcaacacagtttcctttgcggacggcatcaaataccatcgcacacgcaaggactatcacgagatgcaggcggtttccgatgagctttgccgggaatacgggctgtcggtgatcgagcatccacggcaaggtcggggcaagcaatacggcgaatggcgtgccgagcaggaacagcgccccacttggcgtgggctgatccgctctgacatcgatgaggcaatacggcaggccatgaccgagcggcagttttttgacgctctgcggaaaaagggctatgcggtgaagatcggcaaggatatttcggtcagaccgccgggcaaggagcgatttgtgcgcctgatgcgcaattttggtgaggactactctttggataacatccgcaggcgcattttatcccagagccgccccgaacggagaatgcccgaacagaagccggagatcctgcgggtcaggctgatcggcagcttgaaaaccgcccgaaaactgaccggctttcgggcgctgtatgttcactactgctatctactgggtatcttctcgaagaaccgcccgccgcaaagcagaaaacggctgcattttcttctgcgggaggatctgttgaagttggatgccatcaccgccgaaacaaggctgcttatcgggcatcggatcgataccgccgagcagcttttttgctaccgtgacgaggtgaacggaaaaatcgaagttctgaccgagaagcgccagcagctctacaaattacagcggacggcggcggtgaagtccgatcccgaaaaggcggtggaggtcagggcgcagatcgccgcactttccaaagagcttgccgcactgcggaagggggtggttttatgtgacagcattgccgagcgctccggcgtgatccaagagaaaatcaaagccgtccgtgaggacgagcaaatcaaaggaaaggagaaaaccgaccatgtacaattccggtgacgcagcggagcaagtcgtgcggatcagcctggagggtacggaagttgccctgaagctgaccggctcggcggcaaagaatatcgctgccatgctctacgctgtctggaaaaatcgagataaaaacaagaccaaaggccaccagcggctctcagccatgctcaaaagtggcaaggagctgaaagtgttcaccgtcagcgaggagcatctgaaacagtttgcgaccgaggccaagcggtacggcgttgtttactgcgccctgcggggcaaagagcgctccgctgacggcatggtagacattatggtgcgtgccgaagatgcgtccaagatcaaccgcatcgtggagcggttcaagctggcgacggtcgataccgtttccatcaagcgggacatcgagcaggccaaggcggacaaaaccggcccgtccgcccctgagcaggagaagcccgacaaggcggcagatgaccgcctgctggatgacctgctgggcgcacccgtccaaaaggaggagcacgcatccccaaaccctgcggcggcaaagacggagaaatcccgtccgtccgcgcctacctccgagaagcaaagcagaaccgccgagggtactgctaaattttccgaagaacgcccctctgtccgtgaggaattgcgggaaatccgggagagcaggcagaaagaggcggcagggccgagcatttccgaacccaccccggcgaaagatccgaaaaagcagccgaccaccacccacaaacagccctcccgaaaggaaacgaagaaatcaaaggagcgatgaccgatgagcaattttgacgatatttttgaatctgtcccgcagaccgacgaatttgacaaggaggcgtgggcggcgaagaaaaaggcggagcgtgacgaggtttatgctctggctgatgccaccgccgagacgatctgcacagacggcagcaaattccgtgattatctggatgtgcaggcggctttccgcaactactctgccaccaacgccctgctgatccttgccacgaagccggacgcccgcagactgggcgacaaagatttctggcgggatcagggcgtgtatatcaagcggcaggaatttggccgccccatcaagattgtcgagtccaacggcgagtacacccgtgacgatggcagcatcggcgtgtcctacaacatcaagcgggtctatgacatttcgcagaccactgcctggacgagaacgccgcaggcggtttcccatgacgcacgggcgctgctgaatgccctgatctacaagcgtcctacgccggtgcagtccgtggatgagctgccgaatggcatcgatgccgtgtatgaccgtgagcagaacgccgtttttgtccgccgtggcttgtcggcaaacgaccttttctgcggtctgtccaaagcgctggcgcaggcggagcttgcccggaccggcgatgaatacaccgaagaaaataccggtttcaaggcgcagtgcgtttcctatatccttggcaaagagttcggtgtggaggtgagcggctatgcctttgaaacgcctgccgactttttgcgtaccgatgacccgcagacgatccgtgctgagctgaccgacatccgggacaccgcctatgatatttccgcaaggatgatgcggtcgctggaacagagcaaagcaccccgcttaagcgaacaggagcgatgaatatggggaaacaggaaaaacgggtattgactcttgaccgctatgagcacggcgttgtggtcaatgccctcaatgaaatgcggaatgatctgctggaggaagaacgccccaccgacattgttgacgaagttcttttgaaggtgatcgatgcccccgcaaagaaggtaaggtgccgaaacgatgaagcgagagaataaccctcttgtcctctgcttgttcggtattctccccgtggtgtggctggggctgctgctcgcccctgccgcccacggcggtctgccggagatcgtcgcccggtttcccgcggtgatgaacgacccgtttcacatcgagctttgcggggacagtctgaaaactgtcctcgttctgctctgcgcttacgggcttgcggtgggtgtcattctatcgtcccgccgcaattaccgccgtggcgaggaacacggttcggccaagtggggctcggctcgaaccgtcaaccgaaaataccgggcagccgagccggaggaaaacaagatcttcacgcagaatgtccgtatgggactggacgggcgaaagcaccgccgcaatctcaatacggtcgtggtcggcggcagcggtgcaggcaagacgaggtttttcgcaaagccgaatctgtgtcaggcaaacacgagctttaccgtgctggacccgaagggtgagctgctgcgaagcacgggacacctgctgcggcaaaagggctatgaggtgcgtgtgctggatcttctgaatatggagaaaagccactgctacaatccgtttgtctacctgcgggacgacaatgatgtgcagcggcttgtgaccaacctgttcaaaagcaccacgccgaaaggcagtcagtccaacgatcccttttgggacaccgccgcatctatgctcctgctggcactgatcttctatctgaaatacgaagcgccgcccgacgagcagaacttcccgatggtcatggagatgctgcgtgcggcggatgtgcgggaggactgcgacgaatacacctcaccgctggacgagctgtttgagcggctggaaatgcgggagcccgaccatatcgccgtgaaatattacaaggactatcattccggcagcgccaaaacgctgaaatccattcagatcacgctggcggcgaggttagagaaattcaatctgtcctcgctggcggcgctgaccgccacggacgagctggatctgccgtccctcggagaaaagaaagtggcgctctttgccctgatccccgacaatgacaccagctttaactttttggtcagcatcctttatacccagctttttcagcagctattctatctggccgaccacaaatacggcggcagtctgcccgttcccgttcacttcttgatggacgagttcagcaatgtcagtttgccggaggacttctccaagatccttgcggtcatgcgttcccgcaatgtgtatgtatcgatcattctgcaaaatgtagcggcactcaaagcgctgtttgaaaaggaatgggagtcgatcctcggcaactgcgatgagttcctttatctcggcggcaacgaaacttcgacccacaagctgatctcggaatcctatctcggcaaatccaccatcgacaccaacacctacggcaaatcatccgggcgcaacggcaattacagcacgaactatcagatcagcggcagagagcttctgatgccggacgaggtgcgtatgctggacaaccgttacgcccttttgtttatccgtggtgagcgcccagtgatggacgaaaaatacgacat

SEQ ID NO: 13958 - DNA, 83293 bp, Unknown
  gut microbiota DNA sequence
gttcgaaagatgcggcggggaaacggataaagcatcgcgggggagctcgaggggggtaaggcccgcctcgaatgagatccggtctttttttatgaccggtgaaaccggtcaaaatgggtttatcgcggccgttcgaaagatgcggcagggaaacggataaagcgtcgcgggggagctcgagggggtaaggcccgcctcgaatgagatccggtctttttttatgaccggtgaaaccggtcataaaaaaaggcctcgacttccgtcggggccaagacatccgctccggcggggaggaatctctctgtctgccgtgagcataccacgctgtgccgcgccgtgcaaggcacaaatgtttccacccggcacatttgcggttgcaaacggcgtgaaaacatgccatactgtaaacaactttgcgcagggaggtgcagaccgtgaaacgcagtgaggaacgggaacagaacatccggcgggtgatccacacggcgcagacgctgttcatcgcggacggcatcgccgcgacgcccatcagccgcatcgccgaggcggccggcctgacgccgacgtcgctgtaccgctatttccgcaacaaggacgcgctcgtgtttgccgcctggcgcgacgcattggctacgttttttactgattttatggagcagtacaagcgagagtccgcagcgtgcacgacggggtatgaaaagttcgtcgtctgcatgcacatttacttccgcatttatgatgaccagccggagtggtacgactacacgcgcgagatgttttcggcctattccgagaagaacaccggcagcgacgtcaacaatgtgttctggaagtactacgacaaggagatccccgtcccggcgctcaaggccctgcgcgaaggcgtggccgacggctcgatccgcccggatgtgaatatttacgcggtgtatcagtgtctgctcaacgcttataccggtacgacgatctatgagaacgtgtccttcggcgtttctccggtcgatgtcgtccagtttaccggcgagctgctcgtgagctatatcaagaatgaaccagacgcctccgtactggcaggaaaacgtgaaaaggcgtcagatatgtaacaaatgatacggtacggacgtgccaatttgataagatgtgagaagaagcagcaagtttctttttttgcgcatatatgttagtgacgctaacatattattcaaaaacggcggaggtgtgcagcacggataaaaacaaacgttcctatgactttacggtgtgcctgccgttctggaattcgctgacgggctctcagcagcagatgctgcgcctgaatacgatcgtccgctcgtaccgcgcgggggacgacgtgatcttttccatgccggaaaaaaacggcctgtttctcgtgctctccggcggagtgcgtgtgtttattgcgacggacaccggccgcgagatcacgctcatgtcgatcgtcagcggcggctgctgcatgctcaatacgctcgacagtgcagcgccgggtgacacggtccccatcctgcaggcgaccagcgacgccgtgtttgcctatatcaacattgtggccctgcgcccgctgtgcgcggaatcgccggtcgtgcagcagtttttgcagtgcacgcaggcgcgcaatgtccagacggtgctcaataacatagagtattattttttccatcctctgcgcagctgcatcgcccgcgtcgtgctcgaaaaggccgatgcccaccccgaggatggctttgcgcgcatcacccatgaggagatctcccaccacctcggcaccacgcgcgaggtcatcagcagggagctggaggggatgcgtcagatgggccttctgcgcaccggccgcggcaagatctatgtgctcgaccgccctgcgctggagggcatggccaacttgtagggcacacttgacgaccatatatgtccaaactggaagctgtcaaaaagcgaatttcgctttttggcagctttcttttgtgctatttgacgcattttgattggacgttcggcgaaaaacggtcaaaatacacaatcgcaaatcgtcagtttagtgacattcaacgaaaccaaatggttatgtttaattatcgccatttgcgtaacaaatggtgcagtaaagacggcgaaatacgctatattgataattgtcaaacgaagctgcttctttttttggaggcaagtgttagtgaccataacagaagaaactcgtgcagcggactgcacaaaaaatacggaaaacacatcatgaatgggaggtacacagaatgtattacagcagcggtaactacgaggcgtttgcaacaccgaaaaaacccgaaggcatcgacaacaagtcggcatatgtcgtcggcaccggcctggccggtctggcggcggcttgcttcctgatccgcgatgcacagatgcccggcgagcacatcacgctctttgagcacctgccggtggccggcggctcctgcgacggcatctacgacgcgaccaagggcttcatcatgcgcggcggccgtgagatggataaccacttcgagtgcatgtgggatctgttcaagtccatcccgtcgatcgtgaacccgggcgagacggtcttctccgagtactactacctcaacaaggaagacccgaacttctccctgtgccgtgtcaccgagaagcagggccaggacgcccacaccgaccgtaagtacggcctgacgcccggcgccgccacccagctgctgaagctgttcatggcgaccaacaagtccctcgaggacaagaagatcgatgacgtgttcgacgatgagttctacgccacgaacttctggacctactggcagaccatgttcgcgttcgagaagtggcacagcgccctcgagatgaagctctacctgcagcgctacatccaccacatcgacggcctgccggatctgagcgcgctgcgtttcacccgctacaaccagtatgagtccatgatcctcccgatgtgcaaatacatcaccgaccacggcggaaaggtcctcttcgacaccacggtcacgaacatcgtctgcgactgcaccgaggataagaaggtcgccaagaagatcgagtacacccagggcggcgtggaaaaggtcatcgagctgaccgagaacgatctcgtcatctgcacgaatggctgccagggcgatgcgtccgcttacggcgatcagacgcacgctccggtcatcaaggtcaagaacggcgaaggcccgtccatcgagatgtggaagaagctcgccgcgcaggatccggcgttcggccatcccgagaagttcttcaaggacatcaaggagaccagctgggagtcctggaccgtcgacacggccaacaagcagatcctcgacgccatccagaagatctgcaagcgcgacccgctgtccggcaaggtcgttaccggcggcatcgtcacctgccgcgattcgagctggctcgtcagctggaccatcaaccgtcagggccagttccaggagcagccgaaggatcactgcctgatctgggtctacggcctcaactgctgggacgacaagggcgacttcatcaagaagaacatgtgcgactgcaccggcatcgagctggcggcagagtggctgtaccacatcggcatccccgaggatcagatcatggatctggccacgaacgaatgcaacaccacgccgtgcatgatgccttacgtcaccacgttctttgagcccagagccgaaggcgaccgcccgaaggtcgtgcccgatggttccgtcaacctcgcgttcgtcggccagttcgccgataccccgcgcgacaccgtgttcaccaccgagtactccatccgtaccgcgatggaagcggtctacacgctctgcaatgtcgaccgcggcgtgccggaagtctggggcagcgtgtatgatatccgcgacctgctctacgccaccagcaagctgctcgacggcaagaagccgctggagttcctgctcccgtcggttctgccgctgctcgacctcgtcaaggagccgctggtcaacaacgtcgtggtggatctgctcaagaagtataacatcgtctgacgtaccatcccgttagatgtcgcatcccccctttgccccggcagcaaaagctgccggggcattttgcgtggtgggggagttcgagggggcaaggcatggcagaaaaaatccggcgccgcgaacagcggcgccggatcttcaatattcattcttctacgaccgggaacgtgacccggacctcgaaccccgcgccccagtcggacgcggcggtgagcgtgaggcccagatcctttgcgacctcgcgcgcgagatagagccccatgccggtggctttgttcttctcgtggccggagtctccggtgaagcctttttcaaacacgtacggcaggtcgcacgcgcgtacgcccgggccgttgtcgcggatggacaggacggtcgccgtgccgccgttttccagggaaaaggtcagcaccggcttttcgagcgcatacttcacgctgttgctcacgacctgcccgagcaggaagcacagcccgcgccggtcggcaaagaccgtctcgtccgtcggccggatctcgacccggaagcctttttcctccagcagcgggcggtaatcgtcgagcacctcgtcgatgcagccgcgcagcgtcagccgctcaaagcgatagtcgcgccgcgcgccgcgcagacgggcgtagtagagcatctggtcgatgaacgcctgcatccggttgcgcacgtagtcgagcttgaagcccacggcctccggcagcgtgtcgcgccggttgtcgagcacgagcgtcagcagcgccagcggcgttttcacctcatgcgcccagagctccacgtagttttcgtagtcgtccatctgcgcctgtaactgcgcgatggcctgctgctgcgcgcgcagcgtctcgccgagcaggtgcacgctctgcgcctcgtttgccgagagcaggcggcacagcgcctgttcgtgcgcggcgtccggcgcggtcagaaaggccgtgaaggcccgctcccgctttttcgagcgcgcgcagagcaccgcgcacacgccggcgaacagaaacaccgtcgccagcacgatcacggccgtcatggcggcgaaggcccgcgcgtccaccagccagagcagcagcgcggcgagcgcgtccacacccagcagcagacccagccacggcaggtactgccgcaggtagcttccgttacgcttcatgcgccacctccagccggtagccgacgccgcgcacggacacgagctgctggcacatgccgagggacgccatcgtctttttcagccgcgtgaggttgacctgcagcgcattctcgtcgatgaactccgtcgtgccccaaagcgcgcggttcagctcgtctttcgtggcggtctgcccgccgtgtgccagcagcgtctcgagcagcttgccctgattcggcggcaggacgacggactgattgtgaatgtagagcgtgtaggtctgccggtcgagcagaaagtccgccccctcgagcaggttcggccgcccctcgtagcgcttgaggacgtttccgatgcgcgcgagcagccgctccttccgatagggcttggtgaggtattcgtccgcgccgagctcgagcgcgtgcacctcgtcgcgcagctggtcgcgcgaggtcagcacgagcacgggcagggcgctgcgccgcttgagatcgcggcagatttgaaatccgctcacctccggcaggttcagatccagcagcaccagatcgggggcgagtgcgagcaactgcccggtcacgtccgcaaagtccgtgacctccgtgacggcgtagcccgcccggcgcagcatatccgccagttcctcgcgcatgagcgcctcgtcctccacgacggcgatgtgcttcatcgcgccgccccctttccgtatgcgttattcttcgcgttccggcgccatcagccccagcagataccggctgctggaccgcttgacggccgccatgtacagccattctaccacacacagcagcaaaatcatagcactggcggcgatcatcatttccgtcatgccgctctgcgcgctgccggagagaatgccggaaaagagcgcgcgcacgccaaacaggctgctgactgccgccacgccgaccggcagaccaaaataccagttgatctgcgcctttgccgcgcggcagagcgtgtcgtgctccgcaccgagacgcacgagcgtccggtagcggcgcgcggccttctgctggcccatgagaaactgcacgccgatgatggtgttggccacgacgaggaagatgatggcgaggtagatggtcaggtagctcgccgcgacgatgtaaaacagctcgcggccgagattttgcaggtagctctcgtatttcaggccgagcggatcgagcagcgcgttcatgtccgcgatggcgttcatgaggctcttgccctccgtcatggacggggcaagcacgccgtcgaggtagacgtcatagtcgccctgcgtgtagtggtcgaacaccgcgtccggcacgatgagcgcaaacgacatcgtgatcgaccggtcggtcacgacgctcaccgactgcacctgcccacagagcgtgaacggtgcgccgtcgatcgtgatggacgagccctctgcgatcaggcggttgatcagcgccgtgcggctggccagggagacctcgctgtcgcagtagacggcggcctcgttgtccgcgagcgtcagctccggcagaccggcggtcgtcagcaggcggttgtagctgctgagcgcgatgaggtacgggtagcccacggcctccagcgtgtattgcagctgctgctgctcgtcggagacgggcatggcatcgatggagcgctgcaaggcggggaatttcacggtgttttggtagtcagtgctcgtgcgcacgcggccgatgcgcatctcaaagaggtcggaaaatgcgctgtcgagcccgtgcgccgtcagcgtttcgcgcacggtgtcggcgcttttgctgtcagtggggaaggtgtagtcgagcgtgtgcgtctcggcgcgggacgtgcgcgcggtcgctacgcctgcaccgaagcagcacagcgccgccagaatcagcagcgagcagatcgccagcgcgccggagcggtggatgaccgtctcctcgacctgacggaagttgaacacccgcagcctgcccgcgcggtctccgcgccgggccagccggtcgatgatgacgcgcagcccgtaaaacagcagcagcgtgcccgccacgccgagcgcgatcgtgcccgccatatagcgcaggccgctccacgcatacccgaggatggcaaacgtgtacgctccggcgagcagcgccgtgcccagcacgagcgccgcagcgtagacagcggcggggcgctgctttttcgtgccctcgggtgtctccgtgagcagcgcgccgatctcctcgcgcacgatcttcccgctgaggatgagcgaggccagcagcttgatcgcaagaaagcccacggccgtccacccgatggcggacagggagagcgtgaattggtgccccacgatgccgaggccgacgagccgcgccgtgacgaggctgatgacctctgagatcagcagcgccgccggcaggccgatggccagcgcgatgaggctggagcgcagatcctccgccagcagcatgccgaagagcttgcgccgctgcatgcccagcatgaggtacacgccgaattcgtgccgccgccgtgcgagctgaaagcggttggcgtagtatacgaggaaaaacaaaatgaacagcgtcagcccgtacagcaccgggacgagcgacagcagccggtctacggcgctgctctccatgcgctgcagaaacatcatcacgtcctgatgcgacagggagaggatgatgtaaaacgcgatgatcgagatgaccagcgatgtgaaaaacagcccgttttcccggcggctgcggcggctgttgcgcgcaacaagctcagagaacattcgcactcccccctcccagctgcgccatgacggccaggatgcgcccatagaactcctgctgtgtctcgtccggcacgtcgcgccgcagctcgtggaagagcacgccgtcctgaatgaagagaatacgcttgcagtagctcgccgcgttgcagtcgtgcgtgaccatgaggatggtcgtgccggcgtccgcgttcaggccggagagcttttccatgagcgagcgcgcgtttttcgagtcgagcgcgccggtcggctcgtcggccagcacgatctcggggccgaggatgagcgcgcgcgccgccgtgatgcgctgcttttgcccgccggacatctgcgccgggaacttgtcgagcacgtccgtcacttccagatagtctgcgagctttgtcagccgctcgcggctctcgccctcggacacgccgtgcagcgccagcggcaggagaatgttctcccgaccggtgaggttgtcgatgagctcaaagctctgaaacaggtagccgatctccttgccgcggtagtcggcgagcgccttgccgtgcagcgtcgtgatgcacttgtcgtgcagggcgacggcgccgccggtcggtgcgatgacggtcgcaatgcagttgagcagcgtcgatttgcccgagccgctgctgcccatgatgccgagaaactcgcccggcatgacctgaaacgagatgccgtcgagcgcgcgggtcagattctgctccttgccgtaatattttttcagggctgcaatttcgagaatgggttccattgcatgtacctcctttgctttctgctgccatggtacaacacccggcgcacaaaatccacttacagtgcctgaaagaatcttgcaaaagcgcgcggatgcgcaaatgccgcaggcggctgcctgcggcatttgcgctttttattcggaatgttacagcgtgttttctccggtctcaaggccgatgacctcgtccaccgggagcgagaggatgatgccgtgcgcgtctgtgcgcaggccgcaggcgtcgctgatggcgttcatgacggcggcctttttctcgcgcggcgtgacgatgacgacgaactcctcttcctcctgcatggagatgccgagcttctggctgatgcgtttggagttctgccgccggcctttgaggatcgttccgcccatggcgccggcgcttctggccgcgtcgatcgcgtcgctgctgtagccgttgctgagcgcgacccagatggcggtgtaaccggcgctggtttgcatatcggacatatcgctatccaccctttcttcgatcttctgttctatcgtctcgcgcatctgatcgttcaggagctgcagcatcggccgctgcagccccgtgatcgggatcgtcagcacgatgccgccgccgcgtttgtgcagcgggatgcgctgctgcagcgcgtcgagcaggtcgcgcacgagaaatttcggcagcagcccgatcgtgagcaggcggccgctgccgctcaggccgaagatgtcgagcatctccgacggcgcggtgccgtgcccttggcactgataatagatcgggatgcggaaattctgaaacgtctgttcgagcttgcggcggtattcatgattcgtaatgatgagcaccatgcgcggtgcgagtcggttttcggcatgtatcatatctcttcgtcctccaggtcgatgacgccgtcatcggacagcaggtcagctttgttttgtgccacggctttggatctatgtacataaagaacgcccatgatctggatcgccaccggcggggcgagcgcgacgagcgctacgacgccgaaggcgtccgtgacgacgttgccgccgagcgcggtgcacgcgcccatggccagcggcagcaggaaggtggaggtcatgggcccgcttgcgacgccgccggagtcgaaggcgatgcccacgaacacggacggcacgaaccgcgcgaggatgagcgcgagcgcgtagccgggcacgaggatccagtagatgctgatgccggtcagcacacgcaccatggacagcatcaccgcgcaggcgacgccgatggacagcgccgtgttcatcatgctctgtgacacggtgccgccggtgacgtcctcgacctgcttgttgagcacctgcacggcgggctcggccttgacgatgtagtagccgatgagcgcgccgatcgggatgagcacccagcggtacgcgctgccggccagacccgaaccgagcaggttgcccacgggcgtgaagccgacgttcacaccggtcagaaacaggatcaggccgatgaccgtgtacagaaagccgacgcccgtacgcagcagctgccgccgccggtagcagcgcgtcagcagctgaaacagcacgaacaccgccacgatcggcaggatgctcagcagcacttcctcggcatagcccgggaagccgagcgcgaactgccgcgccacgtcgcgcgtcgtcacgaccggcgcgatctccacagcggagtaggccgcgtccgtcgggtggtagaagatgccgagcagcagcaccatcagaatcggcccgacgctgcacagcgcgacgagaccgaagctgtcgtcgtcgtgtccctgcgtgctgcggatggctgacacgccgacgcccagcgccatgataaacggcacggtgatgggcccggtcgtgacgccgccggcatcgaacgcgacggcgagaaattccttcggggaaaacagcgtcagcacaaacagcagcgcatacgcggccagcaggcattttgccagcgagacgcgaaacaaaatgcgcagcacggccagcgccagaaagacgcccacgccgacggcgaccgtccagatgagcacattgttcgggatcgacgcgacctggtttgccagcacctgcaggtccggctccgcgatggtgatgatcgtcccgagcgcgaacgccacgagtacgaccagcagcaccttttcgcgcttcgccagcgtcttgccgacgccctcgccgagcggcgtcatggacatctcggcgccgagctggaaaaaccccatgccgacgatcagcagcacggcgccggtcagaaacagcgccagcgtgccgatctccatcgggacgagcgtgacgctcagcaccagcacgatcagggtgatgggcagcacgctcgagagagattccttgactttttctttcagcttttcattcatacggttgcggtggtcctcctttcgcggggtgattcaggatcgctgcacgaccgcatcgcagcccgtcaggcgcggttgagaatggccatgaactcctcgccggtgatggtctccttttcatagaggtacttggccagttcgtcgagcttggcacggttttccgtgaggatgccgacggccttggcgtgctcttttttcacgagcgcgacgacctgatggtcgatctgcgtctgcgtttcggccgagcaggcgagggaggcgtcgccgccgaggtactggttcgtgaccgtctcgagtgcgaccatgtcgaacgcctcgctcatgccgtagcgcgtgatcatgccgcgggcgagctttgttgcctgctcaatgtcgttggacgcgccggtggagatgacgccgaagcgcacctcctcggccgcgcggccgccggtgagcgtggcgatcttgttttccagctcctctttcgtcatgaggtagtggttgccctcttcgacctgcatcgtgtagcccagcgcgccggacgtgcgggggatgatggtgatcttctgcacgggggcggagtgcgtctgcagcgcggcgacgagcgcgtggccgatctcgtggtaggcgaccgtccatttctcctgatccgtgagaatggcgtttttcttctgatagcccgcgatgacgacctcgatgctttcctcgagatccgactgcgtggcaaagcggcggccgtcgcgcacggcgcgcagtgcggcctcgttgacgatgttcgccagctccgcgcccgatgcgccggaggccatgcgcgcgatcttgttgtagtccacgtcctcggcgaccttgatcttgcgggcgtgcaccttgaggatctcctcacggcccttgagatcgggcagctccacgggcacgcgccggtcaaagcggccggggcgcgtgagcgccgggtcgagcgactcgggccggttcgtggcggcgaggatgatgacgccgttgttgccctcgaagccgtccatctcggtcagcagctggttaagtgtctgctcgcgctcgtcgttgccgccgacctgcccgtcgcgctttttgccgatggcgtcgatctcgtcgatgaacacgatgcagggcgctttctccttggcctgacggaacaggtcgcgcaccttgctcgcgcccatgccgacgaacatctccacgaactccgaaccggacatggagaaaaacggcacatttgcctcgcccgcaacggccttggccagcatcgtcttgccggttcccggagggccgacgagcagaacgcccttgggcatggatgcgccgatgtcctgatatttcgccgggtcgtgcaggtagttgacgatctcggtcaggttttccttggcctcgtcctcgccggcgacatcggagaatttgatgccctcggccgacttgacgtagaccttcgcgttcgagccgccgagcccgaacatcatggagttcggcccgccggccttgttcgtcatgcgcttgagcatgaactggccgagggcgacaaaaaacacgatcggcagcagccacgtcagcagaaacgacagaaacggcgacatctgctcgacgatctcgctcgagaactccgcgccggagtccttcaggcggtagatgaggtcaggatcgtccatcaggccggtcttgtagacctgcgtgtcgtctttgttcgtgaagaggatctgattgttctgcacctccacacggccgatctcctgattttccgtcatggtcataaacgtgccgtagtcgacctccttgacctgccgctggctcagccagggcaccgccagaaagttgagcgccagaatcacgagaatgacgatggcgtaataatacaccaacggctttttggggcttttcacttcattcatgtgaacgcttcctttatcttgataaaatatgtgcacttttcggactcgtgtaacataactttagtttaccacaacaggaaagaactgtccagtgaataaactatgtacatcgtgtacaaaatttgcccaaagcgccggaaaagagacaaggaaagcgccttctgtgcagcaaaggttacagaagaaaggtccttgcgcctgtatgatagtttaataacaatttgacggagggcctcgtatggagatgcttctttaccagagcacgcagtttcgtgacgtgaaaaagatcctggaccgcgcccacggctttgcagggcttttgacggccggcggcatcgaggcctcgcggctggatgtgcccttcgtctgcgatcagaaggtgctctcgcggtatgacgatgcgtgcagcgatgtccgccgcatcctgaccatgcagctggggcttacactgccgaagggcttttccattccgttggaggctgaggatctggcagtctttttttcgcagcagtgcggcctgcagcagatgcaggactacctgacacaaaagcgcgcgcgcacgcaggcggacatccagacctggctgcgcgaccgcccgtgggacacccaccccgtgacggcggcgcaggcggcggcgcagaacctcgtctttgacgcggcgaccggccgcatcggcacggacggctgcttcaacgccggcacggtgctcgagctgccgtcgtcggtcgacggggtgcgcgtgcgcgctctggcgtcctacgccatggtctcctatacgtatctggacacgctcatcctcccggacagcatcgagacggtcgagccctatgcattttatgataaggtgcacctgcgcagtaccaatctgccgcgcggtctcgccgtcatcccggaggggatgttttcgcgctgcatcggcctgacgggcatcgtcatcccggacagcgtgcgcgagatccaggatgaggcgttttaccagtgcagcaatctggacacggtcgtcatccccgacagcgtggagcgcatcggccgctgcgcgtttttgaatgcgcggcgcgtgatctaccacggcagcgccaagggctttccctggggcgcgacgcggggcaactgagaaaggcggaaaccgatatgcatcctacccggcaatttgagaccgccgtctgcggcggcagcaatctgaaagcaccgatgaagctcgacttcctgcgctcgctctgcgcgcaggagcgccatgcgtggccggaggtcgtgctctgccgcgtcgagggcgagacgctgcccgtgtgctgcctgtccgaagcggcggcgggcgacccgtttgcgcgcatcggcatcgtgacagcaccctcggaggcgctcacggcgctgctgcgcaccgcgcccgtgcgggcgcgggtcacggccctgtgcgattccgcgggcgagccgtgcgacggcggcgcaccggacgtctggggctttctcgccgaataccgctgcggcgacccgctcagcggcgcggtgcgcgcggccatcgacggcgcggccgcgcgcggctgcgcgtccccggaagcgctgactgcgcgcgccgagtatctgctcgagcaggcagtgccggagccgatcatcctgcgcgtgttcgcggagatgttctccctgccggaataccccgagctggtgcccgatccgccggtgcgctatgtgcaggcggacggcttcggcgcgctcacgcgctgccttgcctaccggctctcgggcatgcacctgcgcctcgtcggcagcaagggctgcggcaagaacacgctcatccagacagtcgactggctgctcaacgtgccgcagtaccgcatgcagggcaatgccgagctcgacaagctcgacctgctcggcggcccgacgattgaaaacggcaccatgcgctaccgcctgagcgatatgctgcgctatctcgcggcaggcgcggacgtcgtgctcgacgagggcaacaccatcaagcccgagtgcgccgacgtgctccactcgctgaccgacgccgcgcgccagatccaggtgcccggctacgggctcgtgcagatgcacccgcactcggcgttcacgatcacgatgaacgaggactatgccggcacgaacttcatgaacgaggcgacgatcgaccgcttcacgcccatccacatcgccgagccggagagcatcgtcgatgtgctgcaccgcgtcgtgcccgaggcgagcgccgccagcctgaatatctgcgactatgtttactgtgccatccgcgaccgcatccgcagcgccggcgggctcgagccggacgcgatgacgatccgcggctttattgacgccctgcgcgcggagcccctgctgggcctgcgctggggtctgctcgacaacgtggcctccaagccgcaggacgcctacacccgcctccagctgaccgagctcattgagagcatggtgccgcaggatggacggatttgacgccgcgctggcgcgctaccgggcgtttctggcgcatgatcccatcacgccgctgctccggcgcagcctcgcactgctcgtcccggggaatatccgggtcgataccgtcacggcggacgatagtctgcgctgcacgacggacggcacggccgtcaccgtcggcggggcggaatatctgctgcgcacggattttgacgcccgccactggacggccgcgctgcgcgtgctgctcgcgcgcgagatccagcacgacagcagctccgaccgggacgtctgcgcggcgttcgcggcggaggccggcacatattttcacgcgcactatgccctcgcgcccgagaccggggcgctgctcgggcaccggatactgaacattctggagcaggcgcgcacggataacatcctctgccgccgctttccgggctacctgccgctgctgcgcttcgtgtgttatgcgcagctcgaggcggccgcacccggcagcgcgctcgcggcgctgctcgatgagctggaggcttttgcgctcacgggcatcccgtgcgggactccggcgctcgccgccgtccgggccgaggtggaggcggcgatccttgcgccgtcggccgccgcgtgcgcggacattggccggcagatcctcgcggcgctcgcgccggagctggcgcgcctgtgcggcatcgcggatgccgatgcgctcgcgcgcatcgcatcgcagctcgtggactatgccttcagcgagggcgaccgcgcggaagccttcggcgacggctgcgacagccgcctccgcctgcgcagtgaggcgcaggatgcggcgcgccagggcccgtctgccgacggggaggacgccgatcttgaaaaaggcgacagcgcagccggcggcagcggcgacaactccgagcgccacggcgacatgagcggcagcctcgccagtcaggaggtcaagccgagcggctcagccgggacaaacggcagggaggaccgcggccgatcgtccagcgtcggccgcagcggcaatcacggccagagcggggcgaccgccacctcgtcggatacggtgtctgctgcgcagaaggcggcctccggcgggccggagagcctgcgcgaagtgctcggcacgggctggggcgcgcaccgcggctttgcgctcagcgcggccgagacggacgccatgctcgccgcggcggaaaaagcgctcacacgcgagcgggcaattgagcagcagctgcatgtctccggcccgcgtgctgcccggctcgacgccggggagcggcaggggctggccgagcggtatgccggcctgacgtttacggagacgtatatcacgccgggtggcgggcggctgccgcccgcatttgccgagcgggcaaaggcgctgcaccaccggctcgacaaactcctgcgccagcagcgcgaacgcagcgccagccagcgcaccggcgcgctctcgcagcgcgagctgtggaagatcccgctcgatgccaaggacgtttttcgccgcaaagcaccgccgtccaagcgcgagacggcgttttacctgctcattgaccgcagcggcagcatgggcgccggtatcggcgacgggacatccaagctctttacggcactggccacggcggccgtgctcgaggaggcgctcaagggcatcgcctatacgaagattgtcgcctttgacggcggcacgaacgccgtggagcactgcgtcatcaaggatttcgaccagaaggagatcggcagccgctgcatcgacgccatggagcagatcgccgccggcaacggcaacaaggacggttattccatccgcgccgccgcgctggatctggccaagcgcaccgagcgccgcaagatcctcatggtgctctccgacgggctgccgtccggctatttcagcgaggcggaggcgatcgacgacgtgcgcacggccgtgcaggcggcgcgccgccggggcctgctcgtcatcccgatcatttacaccgcgcgcacggacgagaacgtggacgcttaccgccgtatgtacgaaaagagcatgatctttgccgattccgtgggcatgctcggcgagtttgagcgcctgctcatgaagctggtgcgctgagcggcaaccgggtgtggaatcgcttgacaagcccggcgcggtgtgctatgatgctttctcgttaaaagggagtagttacaaatgcatgaccaacaatctcccggcatccgccggtggtcatgcgcctattgtgataggtaatgagacttttagcacatcatatttatgatcgtgccgaaagtctcatttttttgtgcgatcacgaaggagaatgcgttatgaacctcgattttaccggcagtaccctctttcttgtcctgctgctgttcgcggcgggccttgtgtgcatcatcaagggcggcgacatttttgtcgacgccgccacgtggatcgcggaggcctccggcatcccaaaattcatcatcggcgcgaccgttgtgagctttgccacgacgctgccggagatgcttgtgtccgtcttttccgcgctggagggcaatgcggacatcgccatcggcaacgccgtcggctcggtgacggccaataccggcctgatcatgtgcctgtcgctgatctgcatggagtgcaccatgccgcggcggcagtatgcggtcaaggcggtgctgctgctcgcggcgatcgcggttctgtttggcttcacgcgcgacgggcagttgtccatccttgagagcgttttgatccttgtcatttttgtgtgctttattgccgagagccttgtcgctgcgcggcgtgagcagtcgcttgaggccccggagcaggatgcccgccccaagacggacggccggacggtcgcgctcaatatcggcaagtttgtgtttggcgctgcggccattgtgcttggtgcgcagctgctgatcgacaacggcaccgcgctcgcacagatgatcggtgtgccggatgccatcatcggtgcgaccatgatcgccatcggcacgtcgctgccggagctcgtgacgaccatcaccgccatccgcaaaaagcagtcgtccctgtcggtgggcaacatcatcggcgcgaacatcatggatctcacgcttatcatgccgctgtgcgcgctcatcctcggcaagccgctgccggtcgagcggcagggcttgctgctggacattccggcgtgccttgtcgtgtgcgcaggtgcgctcatccctgcgcttgtgcagggcaaattcaagcgttgggtcggctttttcatcggcggactgtacatcgtttatctcgtcatcatgttcacgtgcttcggcgcgtaaaaaaaccggcgccggtctcccgcgggaggccggcgcttttttgctgtgatatttgctgcagacagaaaaaaacccggaagccgaagcttccggggcgtggtgcgcgaggcgggacttgaacccgcacgtccggagtggacactagaacctgaatctagcgagtctgccaattccaccactcgcgcataagctttgtcgttcaaagcctgtttaatatagcatttcgcgtgcggattgtcaagcgtattttccgcaactgccagaaaaaatcgcaacgtgtgtcgaaaacgtgaattttttccgctccgggtgttcaaatccggcggtatctggtatactataccgatgaaaaaatgagacccggccatgccgggaacggagttgtgatcaaaatggatttgaaccgtgctgccctcaaagcagacgcccgccggcgcgccgccggctaccgcccgagcccgatcctcgcggcattgatcgtctttgccctcgggctgctcatctcgacgctctcgtcgtacctgatgggcggcgaccgcctgaccacggcgctgacaaacgccgcgcagttcggccccgacgcggtcgagcaggcatacatcagcttctttgagcattacagtgtgtccggtgttgcggtcgtgctcgtcgtcgcgctggagatcatgaactatatggtcagtgtcggctttgtgatcttttcgctgcacgtcagccgggatgaaacggccgagatcggcaacctctttgacgggttcgccctcttcttccgcgtgttgtggctggcgatcctgcaggggctgttcgtgtttctgtggagcttgctgctggtcgtaccgggcatcatcgcggcctatcgctaccggcaggcactgtacctgctgctcgaccacccggagaagtccgcctggcagtgcctgcgcgagagcgcagcgctcatgcgcggccacaagtgggagctgtttgtgctggatctgagcttcctcggctggatgctgctgagcgccctgttcgcgcccgtgtccatctggctcgacccgtaccgcgctatcacgaacgcaaattattataaccggctcgtcggcgcgcagggcggcccgcgcatttacgagggctcgttcaccgacatcccgaacgatccgcagtcctgacggctttatcccgcctttccccccgcctgccgtgtgcaggcggggtgtcttgcgttgacaagccgtggctgtgcggtataatctaaagagaaacccgaggaaaacgaggtgcacagatgcagacggaaaagagcggccgcccgcaggcgatgatcgccatgagcggcggcgtggattcgagcgtggcggcatacctgatgcagcaggcgggttacgactgcatgggcgtgaccatgaagctgtatgaaaacgaggacgccggcgtgccgcgcggccacacctgctgcacgctcgacgatgtggaggatgcccgccgcgtggcctatgcgctgggcatgccgtactatgtctttaattataaggatgcgtttcgtgagcaggtcatggcgcgctttgccgcggcctatcagcacggggcgacgccgaacccctgcctggactgcaaccggtatctgaagttcggcctgctggagacacgcgcccgcgcgctcgggtgcgacgtgctggcgaccgggcactatgcccgcgtcgagcagctgccggacgggcgctacacgctcaaaaaggccgtggacacgacgaaggatcagagctacgtgctcgcctggctcacgcaggagcagctcgcgcacacgcgctttccgctcggcggtctgcacaagaccgaggcacgggagatcgccgaggcgcatggcttctgcaacgcgcacaagcacgacagtcaggacatctgctttgtgccggacggtgactatgccgccgcggtcgagcggctgaccggcgcgcacagcgagcccggccgcttcgtggacacgcagggtaaggtgcttggaacgcaccgcggcatcatccactatacgatcggccagcgccgcgggctcggcatcgcggccgagatgccgctgtacgtctgcggcatcgatgtgccgcgcaacgaggtcgtgctcggccgcaatgacgaactcttttcgaccgaactggacgcgggcggctgcaactggatttccggcgacgtgccggacgtgccgctgcgcgtgacggcccgcatccgctaccggcagccggagcagccgtgcaccgtcacggccacggggccggacacggtgcacgtgtcgtttgagaccccacagcgcgccatcacgcgcggccaagccgtcgtgttctacgacggggacacggtgctcggcggcggcacgatcgactgaactgtgatttttggaagggaggcgcggccgtgtccgtgacgctctatcttgcgatcccctgttataacgaggagacggtcctgccggagacggcgcgccgcctgcgggagaaattcaccgccctgcgcgccgccgggacgatcggccccatgagccgcatctgcttcatcgacgacggctcgaaggacgccacctggcagctcatttccgacctgcatgcgcgcgatccggccttttccggtatccgcctgtcgcgcaaccgcggccaccagaacgcgctgctgtgcggcctgatgacgctgcggaatcgcgccgactgcgtcatttccatggacgccgatctgcaggacgacattgatgccatcgatgccatgctcacggcctttcagaacgggaatgatatcgtctacggcgtgcgcgccagccggaagcaggactctgccttcaagcgcgccaccgcgcaggggtattaccgcctgctgcgcgcactcggcgcggacgtggtgtataatcacgccgactaccggctcatgagccgccgcgcgctcgacgcactcgcggagtataaagaagtcaatctgttcctgcgcgggctcgtgccgctcgtgggctacccgagcacggtcgtgtattacgagcgcggcaagcgctttgcgggcgaaagcaagtacccgctgcgcaagatgctctcgttcgcgtgggagggcgtgtcgtcgctgacggtctcgccgctgcggctcatcacgcgcatcggcatcgtgatgttcctcgtcagcatcgccatgctcatctattttctcgtgcgctatttcaccggccacaccgttgccgggtggtcgagtctcgccgtgtccatctgggccatcggcgggctgcagctgctggccatcggcgtggtgggggagtacatcggcaagatctatctcgagacgaaggcgcgcccgcgctaccgcatcgagacggagcttgatgaccgggaggcggagctttgaagcgcctgcgcacgctctttgacgcgaagctgtggaagtttctgctcgtcggcgtgatcaacacgctcatcggcacgggcatcatgtttggattgtataaccttgccaactgctcgtactgggtggcctcggcggcaaactacgtgctcacgagcatcctgagctttttccttaacaagcactttacattccagagccgggaacgcggtgcggggcaggtcgtgcgcttcgcggcgaacatcgccgtctgttacctgatcgcctacggcatcgcaaaaccgctgtgtctgtgtctgcttgccaacgctgcggtgagtacgcgcgataatgtggccatgctcgtcggcatggtgctcttcaccggtctgaattacctcggccagcgcttttttgccttccgcagcccgaaaaccgaagaaaaatgagacccattcccggatgtgcagcatccgggaattcttttttgaaaaaatgcagatatcctattgacaaatgggaggaaaaatggttatataaacgcatgaacaatcattcatatgttcaaacgaaagtgaggagatcccatggcagaaccgagacccgacagcgcaccggcgtgcgaatatctcaacgtgcacgaggacgcggtggcgcaggtgcttgcggccctgccggacgatgagacgctctacgacctgtcggagctgtttcgcgtctttggcgattcgacgcgcatcaagatcctctatgtgctcttcgagagcgagctgtgcgtgtgcgacattgcgcggctgctgaacctgacgcagtcggcggtcagccaccagctgcgcattttgaaggcgtcgaacctcgtccgcttccggcgggagggcaagaccgtgttttattccctggacgacgatcacgtccggtccgtgctggccctcggcatggagcatgtgctggaaaaatgatggcccggccatcttttcaaataacattcaatgacagatgaaggagcgtacatcatcatggaaaagacctataagatcgaagtagactgcgccaactgcgcggcgaccatcgagcggcacgtggcaaagctcaagtgtgtcaaggaagtgaccgtgagctatatggcacagaaaatgctggtcgaatatgcccccggtgtggacgagaccgaggccaaggcggagatcctcaagaccgcgctcaaggtcgagccggacttccgcttcgaggactgaatctcatgacgcgcgaacagaaaaggtcgctgctgctcatagcagcagcggccgtgctgctcattgggctgcactttgtgccggtcacgggctggctcaagctcgtgctgtatctcatcccgtatctgctcgtcggcggcgagacgctcgtcgatgcctgcaagggcatttataaccgccagccgttcgacgaaaacctgctcatggccgtggccaccatcggcgcgatggtgctcggggactatcccgaggccgtgtccgtcatgctgttttaccagatcggcgagctgtttgagagctacgccgtcggccgcagccgccggaacatcggcgatctgatggacatccgcccggattttgcgtacgtggagactgctgacggcattgtgcgtgtcaagcccgaggaggtcgccgtcggcgatacgatcgtcatcaagcccggcgagcgcgtcccgctcgacggcacggtgctcacgggcacgtcggcgctgaatatgagcgccctgaccggtgagagcgcccccgtggacgtcacggagggcagcaccgtcgtcagcggcagcgtgaacctgtcgggtgtgctgcgcctgcgcgtggagaaggtgtatgccgagtccacggtcgcgcgcatcctcgagctggtggaaaattcttcgctcaaaaaggcgcacactgagcgcttcatcacgaagtttgcccgcgtctacacgccgtccgtttgcggtgcggcgctcgcgctggcaatcctgccgccggtcgtgcggctcattatgggcatcccggcagagtggggcgactggatctaccgcgcgctgacgttcctcgtcatcagctgcccgtgcgcgctcgtgatctcgatcccgctgtcgttcttcggcggcatcggcggcgcgtccgcccgcggtatcctcatcaagggttcgagctatctggagatgctggccaagaccgaccgtgtcgtctttgacaagaccggcacgctcacgcgcggcacgttcgccgtcacggcggtgcatcccgcgcagccggagctgtccgagcaggcgctgctgcagcttgcggcggcggcggagcagttttccgatcacccggtcagccagagcctgcgccgcgcggccggagagcttccggccgaccttgtcacgacggacgccaaagagctcgccggtcacggtgttaccgcgcaggtcggcggccggtctgttgccgccggcaacacgaagctgatggacaccctcggcctgaccgtgcccgcggtcaatgagaccggtacggtcatccacgtcacggccgacggcgcgtatctcggctacatcgtcatctccgacgagccgaagaccggctcgcgcgaggcggtggcccgcctgcgggcggacggcgtgcgcgtcgtcatgctcaccggcgaccggaagagcgcggccgacgccgtggcggaggagctgggcatcgcggaggtgcacagtgagctgctgccggaggataaggtcacgcaggtcgagcggctgctcggcgagggcgcacccgggaaataccttgccttcgtcggcgacggcatcaacgatgcgccggtgctcgcgcgcgccgatctcggcgccgctatgggcggcatcggctcggacgctgccatcgaggcggcggacatcgtgctcatggacgacgatccgcgcaagctctcgctggccatgcgcatctcgcgcaagaccatgcgcctcgtctgggagaacatcgtctttgcgctggccgtcaaggccgtctgcctcgtgctcggcgcgctcggcattgcgaacatgtgggtcgccatcttcgccgacgtcggcgttatggtcctgtgtgtgctcaacgccgcccgcgcgctcaatacgaagcacctgtaatgctgatctctgtatgaaacaggatagaaaagaggccgccgaaaggcggcctcgatcttttagagtgtctgtgccaacaaaaaagaaactgcgcagcgggggagctcgagggggggcaagacccacctcgaatccgatccaaagcaaaagtcctgatggatcagggcttttgcgcgtccggcattttgctgtgaaaaaggccggacggcgaaagcgcgttcaggaaagttcggtacggactttcctgacaagctgagaccgccgtcggcggccttttttcatgcctttttcacgtgcaccggcggaagctgctgtccgtgaggacacgcgcgcagatcagccccagcggcagggagacgacgatcagcagcgaggcgacgagccacgacgcgctgtcgctcaggttcattgtgcccagatcgtacacggcgcggtagaaatacagccccggtaccatgatgacgatcgacggcacggtgatcgtgatgcgcgggtagcccgagcgccgcttatacacggaggcgagcaggcccgccgtcagcgcgccgaaaaacgcggccgctgccggcgggaagccggccagactgacgagctcgagccgcagggtgttcgatatcgcgccgatcacggcggcgacggacgcgagcttcacgggactgttgaacatcagcgagaagccgaacacaccgcagaagctcatcgccagccgcagcaggatgcgcgcccagacgggcagccccagcggcagaaaatccatcggctgcagccgcagcagcagcgccatgagccaggcggtcagcgtcgccacgacgacgatcatgatcgcgtaggccagccgctcaagtccggagcgcatgtcctgcttggacatgtcgatgccgctcgtgatgaacgggaagcccggaatgatgaacagcatcgcgcagatataccccgcctgatgctgtgggtcgatgggccagagcagcgatgccagccggaacagcccggcatagaccagacatgctgccgcaacggacagggcgatgcagccaaacagcgtcaggtgccgctgcgtcagccgcgcgcgcacatactgcccgacgcccgcacccagaaaggccagcagcatctcgatcggcccgccgccgagcaggaacgtgaatccgccgcaggcgagcgccgcggccgctccctgctgcagcggggtatagctgccgcctgcctgcgcgatctcgtcgagccgggtgtgcaggtcgtccgccgtcatgtacacgccgtcgagcggaaaacgcttgacaaagcgctcgagctggtcgagcttggcggtgttgacgccggttgccgtcagcgtcagcgtctgggcgaacgtgttctcgccgtcggagcaggtgtactcgatggacagcagcccgatgtcggcggcgcacacaagaccgagcgcctcggcgatctcgttcatggagctgcgcacacgccatgcgccggtgccgcacgagagcagcagcagaccgacccggccgacgacgccggcgcggatgggcagcggcgcctgtgagacgggcagctctttctgatcccggatggggtcatgccacgggatctgcatatgatttggtttgatgatcggatgatgcaacgtatttcacgccttttttgaaaattcggattgtattgtagtcttgtgcgcgccggaagtcaagagcggacgatcagacggcccgccaaaaaccgatgcgcaagcggagacggcctgtcatttgacaggccgtcctgctggatttgttcagaaaagatcgccgtcgtgggtgtctacataaaacgaatacggcttcccgttcgccgtgaaggtgatgtggtaggcatcgcggccggaaacctgcacacgctggacattgacgtcgcggatgtccggcagcgaaatgccaagctcctgcagcacgcggctcagggcttcggatatgctgatctccgaacctgcgggggcggcggaatcgtccggctttcccggcgtggccggggtgtccggcgtctgtgcgggctgctccgggcgctgcacgtcgagaatctcgccggtgcgtgcggcgatcgtgtagcagtattccccgccggccgccgcaaagcgggcacgcgctttgcccccgatctgccgctggaccgcgcctggttgcgaccatcgtgcaccgcatcgccggagcaccggatgcggccggcacgaacatgcccttccgcgatgtcccggccggtgcctactatgcgcagcccgtcctctgggcctatcacgccggtgtggtcaacggctgcggcgcggacacgttctgccccacgcaggccatcagccgtcaggatctgacggtcatcctctaccgctatgcctgcctcgcgggcattgcagacgcggcgcagtcggagaacgtcctgagcggctttgccgatgcgggcactgtcagcgattatgcccgcgcggcgctcctgtggcgctttgtcagtcagtattctctcgcttaacaccgcgctgtcccgtgcgtgttgcatccccccattcccgtaactgcggggccgccccggagccaacggctccggggcgggtgctgcttgttttatccggcgcggaacagccgccggtactcgcgcgggccgcagtagcccgccgcgcactgcgaaaaggcgtcgccgagaaagagcctgtccgtgcagatctcgatgatggaaaaccgctcgcccggcgcggcggccaggatgcggatctccgcgtcgagcagcgggcggtactccgcctcgcaggcgtctgtgatgcacatgtccggctgccagcagaaggtctgctgcacatcgcagccgcagatgacagcgtcaaaggcggcaccgtcgcggatcgcgtggtcaatgtacgttcgcagggtcatgattcttctcctcccatgtccatgttgtgtttctgttttctcccttttatcacagcatagcacatgcaaagtccaataatcaggacagtggaggcaaagattccgctatttttgcgccgcgcgcagccaggcgatctcctgcgcgtacccggcgtcgtcgttcggcgtctcgaggatgaacggcagccccgccagcgccgggtgccgggtgacgcgcacgagcgcctccggcgggatgcagccgtcgagcagctttgcgtgccggtccttgtggctgccgcaggggttgaggctgttgttgaggtgcacggcgtgcaggcgctcgagcccgatcacgcggtcaaactccgcgagcacgccgtcaaggtcgccggcgatgtcataccccgcgtcccagatgtggcacgtgtcgaggcagacgccgatgtgctccgtcagctccacgcggtcgatgatggcgcgcagctcctcgaagcggccgccgacctcgctgcccttgccggccatggtctcgagcaggacggtcgtggtcatgtcggggaagaggacctcattgagcagcgcggcgatcttctcaatgcccacgtcgatgccctgcccgacgtggctgccggggtgaaaattgtagagttggccgggcgtgtgctccatgcgctgcaggtcgtcggaaaaggccatgcgcgcaaactccgccacgttcgccttggctgcgcaggggttgagtgtgtagggcgcgtgcgcgaccagccggtcgatgcccgcgcgggcgcattcggcgtgaaaggccgcgatgtctgtttcctcaatgggtttggcgctgccgccgcggggattgcgcgtgaagaacgcgaacgtgtttgcgctcagcgcctccgcgcgctttgccatggcgagatacccgccggcggaggaaatgtggcagccgatccggaacatacgatcacctcaaagaatggatgcccccatcatagcacaccgcgcggcggctgccaagcttgccaccgcgccgcggatggtgtatgctgtttacagattcgttttgatggtggaggatgtgatggcgtggaacgattgacttttcaacccaataaaaagggcgtgataagcggctgcacgatgccggttattgttattttgggcttctttgcctatgccatgttcccggatggatacaagattcttacaaaaggggaactggttttcgtgtgggtactggtgacggtattcgttttaggttacgccgcggcattggtttatatcatgaaatcagctggataccgcacgatgattgaggtcagccagcagggtttttcggttgtagaccccaagcgttcggaacctgtgtttgtaccttggagcgagcagatccatctgtgtacttgcatggaaggagacgtctatagccatcattgggtccacgagaagatactctgcttttctaatcaggacataagcggacagtggatagaaaggggtcaaaccgtgaactaccggcagacgtttgaaacagatgccggacagccgtgggtcgttgcactgacttacggcagcaaggcgaaatgcaagaaagacgcagcgcgcatccgtcagtacatggacggctgtttgcagcagacagaataaccttgccggaagaccgatttggcataccacagaaaaaagggggggcaggccatgcagccgtatgaactcattcgctccggccggcgcacgctggcgctcgaggtgcgcggcgggcgcgtgatcgtgcgcgcgccgtaccggacaccgcgggcaacgattgaccgctttgtcgcgtcgcacgccgaatggatcgcgcgcggggtggccaaacaggaggcccgcgctgccgcgcacccggagccgacggacgccgagcgggcggcgtacatccggcaggcaaaagcctatctgccgcagcgcgtggcgtactattccgagcggatgggtctctacccgacgcaggtgcgcatcacgggcgcgcgcacgcgctttggcagctgcagctcgcaggggcacatctgcttttcgtggcggctgatgcagtacccgccggaggcgatcgactacgtcgttgtgcacgagctggcgcacctgcgctacatgaaccatggtgcggagttttacgcgctcatcgcgcgctatctgccggactggaagacccgccgcgccctgctgcgggcgtgaaaaagcaccggaggacgatctgtcctccggtgcttttcattcggaattgactttttgcacccgctgcgtgtaaactattcattcaggaatcaaggagggatgtaccatgaagcaggcgatcgcgctggccggcggcggcacgaagggcgcgtatcaggtcggcgcgtggaaggcgatgcgggagctgggcatcccgtttgacatcgttacgggcacgtccatcggttcggtcacggcggcgctgatggtgcagggcgattttgaccgcgcgtgggagctctggacgcacatcacggaagagcagatcatgctcgagcgcgccgacgccacgccgcgcgaaaagcgcgagctggcggcgttggctgagcacccggagcagctcatcgcgcgtgtgaaggactgggcggacctcaaccgccgtacggcggacatcacgccgtaccgcgcgctcgtgcaccaatatctcgacgaggcgcgctttttcgcctcgccggtggatttcggactcatgacggcgcgtttcccgtcgttccagccggtcgaggtgcgcaagcaggacattgcacccggctacctgccgcagtggatcctcgcgtcgtcggcgtgctacccgatgtttccgatgtgcgagatcgacgggcagaattatctcgacggcgcgtactcggacaatctgccgatcggcacggcgttccgcctcggcgctgaccgcgtcatcgccatcggcctcaagccggagacgccggagaaaaaatatgccaaccacccgctcgtgacctacatcgccccggcggagccgctgggcaagctgctggagtttgaccccgacgcgctgcgtcacagcatcgccctcggctatacggacacgctgcgcgtgctcggcagctatatcggccatacctacacgttcgaacccgacgggcagacgctgctcgagggcgtcgcgcgcgactatctgctctggctgctgcgccgggagctgacgccgccggactccatgctggactttttccgcagcgacacgccgctgaccgaccgcatcctcagcgaccgccccggcgacctgacggcctgcgcactcgcgggcgcggagtgcgtgctcgaggcgtatgcctacccgcgcggggagatctacgatctcaagctcctgctgccggagctggccatgcgtctgacggaggacgaggacaccacggcactcgagcgcgcgcacgcgctgtgcgcgtcgctgggcagcgagcatttcttcacgcagctggccccgctcacgccgcgctatgacgccaaggacatcttcctcgccacgctcacgctctatctgcgcgagcagacggcctgacgggcaggtttttgttgcactcgcgggaaaaatcgggtatactatctaggtttgatattcgaaagaacaacagaggagcggactatggatctgaaacaggaaatcgagcgccgccggacgtttgcgatcatctcgcacccggacgccggcaagacgacgctcacggaaaagctgctgctgtacggcggggccatccagctcgccggctcggtcaagggcaaggcgaccgcgcgccacgcggtctcggactggatggagctcgaaaagcagcgcggcatctccatcacgtcgtcggtcatgcagtttgaatacgagggctattgcatcaacatcctcgacaccccgggccaccaggacttttcggaagacacctaccgcacgctcatggcggcggacagtgccgtcatggtcattgacgcggccaagggcatcgagccgcagacgcgcaagctcttcaagatctgcgccatgcgccacatcccgatcttcacgttcatcaataagctcgaccgcgaggcccgcgacccgttcgagctcatggagcagttggaaaacgagttcggcatcggcacttatccggtcaactggcccatcggctgcgggcacgacttcaagggcgtgttcgaccgcgaccgccgcgagatcctcgcgtttcaggagtttcaccgcgggcagaacaagatccgccccatcgagtgcgagctcacggacgttgagcggctcgacgagctgatcgggccgcgccagcgcgaaaagctgaccgaggatatcgagctgctcgacggcgcgggctacgccttcgacctcgacgaggtgcgcgccggccggctcagtccggtgttctttggctctgcgctgacgaatttcggcgtcgagccgtttctggaaaacttcctgcacatgacgatgccgccgctgccgcgcacgacggccgacggcgtggtcgacccgatgcagccggcgttttccgcgttcgtgttcaagatccaggcgaacatgaacaaggcccaccgcgaccgcatcgccttcatgcgcatctgttcgggcaagttcgagcgcgaccatgagtacctgcacgtgcagggcggcaagacgctcaagctcgcgcagccgcagcagctcatggcgcaggagcgtgcgatcatcaatgaggcctacgccggcgacatcatcggcgtgttcgaccccggcatcttctccatcggcgacacgatctgcgatgcgaagctgcgcgtacgcttcgagggcatcccgacgttcgcgccggagcacttttccgtcatctcgcaggtggacaccatgaagcgcaagcagtttgtcaagggtgtcacccagatcgcgcaggagggcgccatccagatcttccacgagccgaacagcggcatggaggaggtcatcgtcggtgcggtcggcgtgctgcagttcgaggtgctggagtaccggctcaagaatgagtacaacatcgacatccgccgccgcgacctgtcgtattcctatatccgctggatcacgagcgagggcaccgaccccacggcgctcaacctcgcttccgacacgaagtgggtgcaggacttccgcggccacaacctgctcattttcaacaatgagtggagcatccgctgggcggagcagaaaaatcccggcctgacgctggcggagttcagcacaaatcaggacgacgaggcataatatctcacagggccatccgaacggatggccctgttttttcgcggtgcatcgcgctgccctgaatgcgtaaaaatcccccggcgcgggctcactccgcgccgggggatctttgcctccgcaaagttttctgtacgccgtcaggatgcgacggctttttttgcagcggctgcgtatactggtgtcaaacgaaagcagaggaggggggagcggtgaagaaactccgctttgtgatctttgtcatgctcatcatgctgctgctgtgttcggccgcgcgtgcggttcggtcggcgccggaggcgcgagtggccgtacaaatgcaaaaacctcctgcagcgcaggaggtttttccttatgcaggtatggatgctcagaacagatcctcgaccactttctcgggcgggacttccagcagcgccgggttgtgcatgaacatcttcatgtacttgaacgaggaggcgtaatagtacccgtcgcacacgcgctcgtccatgacggccatgaagtcgatgtacttgcgctcgaccggcttgccctcgcggtcaagctcgaccgccttgcgctttgcgccgaaggcgatgaacatcggcaggttgccgaagttgtacaggtggtgatagatcggcgggatgccgagcgagcccatatcggtgatgatcatcgagccgtggaaggggctggcgtcgagcagcttctgcgggatgatgccgaagtaatccatcacgcgcaggcagccgatggcgaagcgcagcaggaaacgcggcagcttcagcagcgcgccggcgacctgctcggtgttgttgtcctggtcgccgtacttgatctcgtcgatcttctcgttcatcttgcggtagacgtcaaagatcgtgtccgtcggggcgaagacggccttgatggtcgtctcgttcgaggtggtggacatgctgcggcgcacggtcagcacgacctcgatattgttgcgcgcatagatgcgccggccggccacgaaacggttgatgccggggcgcatggagaccatacggatgtaggccgcaatgaacagatgcaggtagccgaggcccttgtagccctcgaggcgcttctggcgcagccagcggtcggtgttcgtgatctcaatgcagtcctcaaactgattgcaggcgtcgttcttcgtgggcatgatgtagggcatgaacttgtaaaacggtgcgagggactggatcaggcggccgtccttgcggtcaccgaaacggcgtttgctttccatgaaagtacctccgaatatgcgaatatagttcaaactttttaactttagcaaaaatattataggctatttccggcacaatagcaagtggaaaaacattttaagtgttgaaatcttgcatttcccaacatttcgttcattttttcatcagaaattatgaatgttcccattgcgagaaatcatgcaaatccgataacgttaaattttcgtcaatgacgtgaaaaagctagcaggatcaatagttttttaacacataggtgtttgaattttgacagacaattttgggcaatttcacttgattaacagcggtgaataaggtaaaatacctacattatgtagaaacagttcgtgaaaacgggcgttgcgcggcataataacagtttgattcgtagggaggtgtacggatgtcatttgaggcgataacaacgatcagtgacgcagaaaaccgggccagacagatcaaagccgacgcgcaggcagccgctgcggcggcagtggaagcggcccaggccgagggaaaggcagtgatagaggctgccgtcggtaaggcgcagcaggagctgcagacgctgcgggccaaatcggatgaaaaggcgaaggcggatgcggaaacgctggcggcggagaccaagaacaaggaagctgccatgcgcatcaaggctaagaccaatctggatcgggctgcatcactcatcgtggaaaggattgtgaacggctgatggccattgtacacatgaaaaagctgcggctcatggtcgttcgccggcagaaagatgagctgctccgggatctgatgctgctcggctgcgtgcagatctcggaaccggacgccttgcttgcggacgcggaatctgccgcagtcctgcgtcaggagagcggcaatgtgacggaggtgcgcagtgaactcacgcgcctgaccgccgcgctcaagctgctcgacaagtatgcgccggtcaagtccaggctgctcagctcccggccggaggtcacggaggcggatttcctggatgacggtgcgtaccgtcaggagctcgatgcagtcgcacagctcgaggagctggaggcggccgtgcgccgctacaacggcgaggaggctaagctccgcagcaatatggaggccctgcgcccgtggcagacactcgacctgccgctggatctgggcgaaaccgtaaggacccgcatttctctgggtatgctgcccgcggcagtggatcttgccgaggctgcaaaagcgctggcggacgctgcgcccgagtcgcagctgtatgagatctcttcggacaaggaacagcactatgtgctgctcatttgtttgaaagaggagctgacggaagccatcacggcgctgcgcgcgtccggcttcacgctggcaaacctgaacggcgcgccgggcacggcaaagcagaacattgaggacgcgcagcagcagatcgcggacgtcatccgcaggcgtgagcaggcggagacggatattgccgcctttgccccgcaccgggatgcgttcaagctctgcatcgaccgcgcgagcgtgaagctcggccgcgcggaggcggaagagcgcctggtcggtaccgagagcgtcgtgtgcatgcgcggctggctcacggcgccggaggaggccaagctcaccgcggtgctcgcaaagtatgactgcgcctgggatctggccgatcccacggaggacgagtacccagaggtgccggtcaagctacaaaacaacaaatttaccgaaccgctgaacatggtcacgaacatgtacagcctgccggcctacggcacggtcgatccgaacccgctcatggcgccgtttttcattttgttctacggcatcatgatggcggatatgggctacggccttgtgatgatgatcgcggcgctcgttgcgctcggcaagatgaagccgaaacgcggcagcaagtatttctgcgagctgctgttcgcctgcggcgtgtcgacgttcctgctcggcatcgtgacaggcggcttcttcggcaacgccgtgccgacgatcgtgaacatgtttggtcacgacgtcaagctcggcattctgacaagcccgctgctcgacccgctgaccgatacgacgcagatcctcatcggcgccatggtgctcggtttcatccagctctcgaccggcatggtcgtgaacatggtcatggagtgccgtcagggcaaggtcggcgatgcgatcttcaacgagggcacctggttcgtgatcttcgcgggcctggcgctgttcgtactcaagatcggcaacatcggcggcgtgccggtcgtgctgtgcatcggcgttctgatgctgatctacggttccggccgcgaggccaagggcttcggcaaagtcaccgccgtgttcggcgcggtctacaacggcctgaccggctggttcggcgacattctctcgtattcccgactcatggctctgatgctggccggcagcgtcatcgcgcaggtgttcaacaccctcgccgcgatgccgtcgagcggcggcgtgacggtcgtgtcgatgttgatcttcatcatcatcttcctgttgggccatctgctcaacttcggcctgaacctgctcggctgcttcgtgcatgacctgcgtctgcagtgcctggagttcttcggcaagttctatgtcgacggcggcaaaccgttccgcccactcgagatcaacacgcgctatgtcgacgtggaaaatcataatttctaaacattcgtactcaagagatatttaaggaggaaattgaaaatggcatttctcgaatccatcggtggtctggctctcggccttctcggcgctgcgctcgcagcggcgctcgcgtgcattggctctgcaaagggcaccggcatcgccggtgaggccggcgcaggtctcgtctcggaagatcccagcaagttcggcaaagcgatgatcatgcaggtcatccccggcacccagggcctgtacggcttcgttatctggttcctggctcagagccagatcttcgccgccaacgctgccgctccgctgaccgtcgctcagggcctgcagtacttcgcagcctgcctgccgatcgcgctcggcggtctgatctccgccatcgcgcagggcaaggtcgctgccgcgtccctgaacatcctggccaagaagcccgacgactggtccaagggcatgatcttctgcatcacggttgagttctacgccatcctctgcctgctggcatccttcctgatgctcaacggcttgaagtaatccccatcctcttccgacagaagggaacaaagatctatgaatggtattgaaaaaatcaccggccgcatcgaggcggacgcgcaggagcaggcgaaggccatcgcggccgaagccgaggccaggtgcgccgagatccgtgccgattatgacaaacaggcgcaggaccagtactgggcccgcgtccgcgacggtgtgaaagcgtgcgaggaccgcgtgcagcgcatgggccgtctggcggaaatggaagccagaaagagcgtccttgccctcaagcaggagatggtcgacgcggcgtttgccgccgcgctcgataagatctgcaccatgccgcaggcggactacgtggcgtatctggccaaactcgccgcgcaggccgcgacgaccggcaccgagaccctggtgttcaacgccaaggatcaggccgcgtgcggtcaggcggtcgtggacgctgccaatgcgctgctcgcgcagcagggcaagcccggccggctcaccatgagccaggccacgcgcgacctgcgcgccgggtttgtgctccagcagggagatatcgaggtcaactgtgccgtggagacgatcgcagagctctgccgcagtgatctggctgctcaggttgccgaggtcttgttcggcgcgtgacctgccccgccccgtgcggggggaatgaattatcctatatggggcgcagagtgctgcgccgcatgagggaggaatcgaattgtctaaagtaaaagatacgaattaccttgcgattacggcaatgctggcagcccgcgagaccaaaatgctttccgctgagcgcatggagcgcatgatcgacgcgcccacgaacgacgaggcggccaagatcttggaggaatgcggctacggcgacctgagcggcctgtccgcgaaggaagccggcgctgcgctcgaggcgcacatcgcggcgctgttcgatgaggtcgagggcatggtcccggaggcgcagctcgtgcagctgttccgcctcaagtatgactaccacaatgccaaggcgctcatcaaggcgcgggcgatgggcgtggagtgcgatgcgatcctgtcgcagcgcggcaccgtggcgccgcagaaactgctcacggcgtttctcgaggaggactaccgcgacatcccgcccattctggcgcaggccatggtcagcgccgccgcgatcctggcgcgcacgaccaatccgcaggcagcggacttcgagctcgaccgcgcgtatttcgcgcagatgctcgcgctttccgacggcctgagcgacggcggctttgccagaggctatgtgcagctgcagatcgacagcgcgaacctgcgcgctgccgtgcgcacgcgccgcatggccaaggacgcggactttctcaagaccgcgctcatcccgggcggcacgatcggcacggaccgcgtgctcgcggcgttcgactcggccgaggcgctcaccgcgctctacggcaacacgtggctgggcaatgcggcggctgccggcgcggcggccatgagcggcggcgcgctgacggcgtttgagctgctgtgcgacaacgcgctcatggactacatccgcgcggccaagctgcgcagcttcggcgcggcgcatgtgtccgcttatctcgccgccatggaaaacgagaccacggccgccagaatgatcctgacgggcagactcgcagggcttcagcccgcggtcatccgggaaaggctgcgtgagacttatgcttaaaattgcagttgtcggcggtgcggagaccgtcatgggcttcaaggcgctcggcctcgaggcctgcccggtcaccaatgccgaggaggcgcgcgaaacgctgcgccgcctgacgaaagactctgaggactacgccatcatctatgtcgaagagaatctggcgcaggagcttcagcatgagatcgacaaattcaaagatgttcccaagccggccatcatcctgatccccggcagggaaggccccctcggcctcggccagaccgcgctcaaggcggccgtcgagcgagcggttggctccgatatcctttaaggaaaggaagaatgaaattgagcggaatcattacaaaagtttccggcccgctggtcgtggcgaacggccttgccgatgccaacgtctccgacgttgtgcgtgtcggtgagcagcgcctgatcggcgagatcctgaatatgaccggcgacagcgcgtccatccaggtctatgaggagacctcgggccttggccccggcgcgaaggtcgagaccaccggtatgccgctgtccgtggagcttggccccggcatgctggagaatatctatgacggtatccagcgcccgctgcccgagatccgcgacctgaccggctccaacatcacccgcggcatcgaggtgcccgcgctcaaccgcgagcgcgtctggcactttgaccccgttgtgcagcccggcaccgccgtcaccggcggcgacgtgatcggcaccgtccaggagacgacggccatcctgcacaagatcatggtgcccccgcagatgaagggcacgatcaagagcatcaccggcggcgacttcacggtcgaccagaccgtcgctgtgctcaccgacgccaacggcgtcgaccatgagctgaacatgatccagcgctggccggtgcgtatcgcgcgcccctatgcgcagaagttcgctccgaacaagcccatgaatagcggccagcgtatcatcgacacgctcttcccgatcgccaagggcggcacggccgccgtgcccggcccgttcggcagcggcaagaccgtcgtgcagcaccagctcgccaagtggtcggacgtggacgtcgtcgtctacatcggctgcggcgaacgcggcaacgagatgaccgacgttctcatggagttcccggagctgaccgacccgcgcaacggcgagccgctgatgaagcgcaccgtgctcattgccaacacctccgatatgcccgtggcagcgcgtgaggcgtccatctataccggcatcaccatcgccgagtacttccgcgacatgggctatgacgtcgccgttctggctgactccacctcccgctgggccgaggccctgcgtgagatgtccggccgtctggaagagatgcccggcgaagaaggctacccggcctacctcgcgtcccgcatcgcgcagttctacgagcgcgccggctgcatccgctgcatcggcagcgagggcgaccgccgcggctccgtcaccgccatcggcgctgtctcgcctccgggcggcgacatttccgagccggtctcgcaggccaccatgcgtatcgtcaaggtgttctgggcgctcgattcgagcctggcgtatgcccgccacttcccggccatcaactggctgacgtcttactcgctgtatgttgactcgctcaagccgtggtatgaggccacgttcggcgaggaatatatggccaaccgcgacaaggccatgagcatcctgcagcaggaatccgaactgcaggagatcgtccgcctcgttggtcaggacgcactgtccccggctgaccgcctgacgatggagactgccaagatgatccgtgaggactttctgcagcagaacgccttcgtcgatatcgacagctactccgagtaccgccgtcagttcctgctgctcggcctcatcctgcactatgacgccgagtgccgcgacgcgctcgggaagaacgcgccgatgcacaagctctttgccatccctgcccgcgtcgacatcggccgcgccaagagcgtgccgagcgacgagtacgagcaggtctatgccaagatcgccgcggacatgaccgcgcagatcaaagagattatcgccggaggtgaggagcagtgattaaagagtataaaacgatccaggagatcgccagccctctgatgatcgtcaagaacgtcgaaggcgtgacctacgacgagctggccgagatcgagctcccgaacggtgaagtccgccgctgcaaggtcctcgaggtcgaggacgaccacgcggtcgtgcagctctttgagagcgcgcagggcatcaacctcgcacagtcgaaggtccgcttcctcggccatccgctgcagctgggcgtgagcgaggatatgctcggccgcgtcttcaacggcatgggcgagcccatcgacggcggcccggcgatcctcgccgaggagcaccgcgacatcaacggcctgccgatgaacccggcagcccgcgcctacccggcggagttcatccagaccggcgtttccaccatcgacggcctgaacaccctcgtccgcggccagaagctgccgatcttctcggcgtccggcctgccgcacgccgcgctggccgcgcagatcgcgcgccaggcgaaggtgctgggcgacaacgagaacttcgccgtcgtcttcgccgccatcggcatcacgttcgaggagtccgagtacttcattcaggagttccgccgcaccggcgccatcgaccgcacggtcgtgttctccaaccttgccaacgaccccgccgtcgagcgtattgccaccccgcgtatggcgctgaccgcggccgagtacctggcctttgaaaaggacatgcaggtgctggtcatcctgaccgatatcaccaactacgccgaggctctgcgtgaggtctccgcggcaaagaaggaagtcccgggccgccgcggctaccccggctacctgtacaccgacctggccacgctctacgagcgcgccggccgccgcatcggcaagtccggctcgatcaccatgatcccgatcctgaccatgcccgaagacgacaagacccacccgatccccgacctgaccggttacatcaccgagggccagatcatcctctcccgcgacctgtaccgcaagggcatcattccgcccgtggacgtgctgcccagcctgtcgcgtctgaaggataagggcatcggcgagggtaagacccgtgaggaccactccggcacgatgaaccagctgttcgcggcctatgcccgcggcaaggacgccaaggagctcatgaccattctgggcgaggcggccctgtccgacgacgacaagcagtttgcgaagttcgccgatgcatttgagcagcgctacgtcaatcagggcaacaacaccaaccgcaccattgaggatacccttaacctcggctgggagctgctgagcctgctgccgcgcaccgagctcaagcgtatcaagcccgagctgatcgaaaagtatatgcccgagacctgagcgcatccgtcccgcagacttaccaagtgaggtgatttgatggcaaatacggcaattaccccgacaagaatggtgctcaaccagctcaagggccggttgaaaaccgctcgcaggggtcataagctcctcaaggataagcgtgacgagctgatgcgtcagttcctcgacaacgtgcgcctgaacaagcagttgcgtgcaaaggtcgagcagggactcacggaggcgttcggctctctgtcggtcgcgtccgcgatcatgtccccggaaatgctcgaacagtcgctgctctacccgcggcagagcgtcgagctgggcatgacctatcagaacatcatgagcgtgaacgtgccggtctacgatttccagacccgcaacagcgatccgtccgagatcttcccgtacggctttgcgcagacgtccggtgagctggacgatgcgctcgagaagctggcggaggtgttcaaggacatgctcgagctcgcgcaggtcgaaaagaccacgcagatgctcgcgcaggagatcgaaaagacccgccgccgcgtcaacgcgctcgaatacgttatgatccccgagctggagcagaacattcgttacatctccatgaagctggacgagaacgaaagttcgaccaaggtgcgcctgatgaaggtcaaggaaatggtcctcgaggacgcacaccactacaagcaataagtatcagaaaaccgccgcatcttgggatgcggcggtttttgcagcagttggaagcagtcgctgcggcaagagacgatcgcgcagcgggggagctcgagggggcaaggcccgcctcgaatgagatgcactccgaaagcacaaacccatttgcgctttcgggttttcccctcggccgaaaatcctttcggccgaggggaaaaccgccgcatctttggatgcggcggttttttgcgcgctattctcgctctattggttttcgtcccgctccatcagctcgagcagatgtgccgtctcggcagcggcgtccggcgcgtttgcctcgacctgcagggcggaagcgttcgcgtccggccggatgctcagctcccagccgccgtcgcgcaggtgcagcccgtcggtaaagtccgccccggcctccatcatggcctccgagaccgtgcgcatcaggtgcgcgcggtcgcggcaggggacggtgcggcggttcgggtctgcgtgcgggagttgcggcggcaggtcgtccgaagcgtccggccgcgccgggctcagccgcccgtcaagcacgtcaagactgcaccggtagtaggcgcgcggcgtgccgatgtcgcaccagtagccgtccatcggcacgccgaggatcggctcgtgcgccgcgagcagcagcgggaagagatctttggcaaaatcaaacggctgatcttccggcacataggccattgcccgcggggagacaatatagatcccggtgttcacgagatcggtcacgacgtgctcccagtccggtttttcgatgaagtgctgcacaagcccctgccggtcctgcagcacgagcccatactgcagcggctctgcgttctggtagagtgcgatcgttacggccgcgtccgcctgctggtgccggcgatagagccccagcaggtcaaagctgcacgcggcgtcgccgctgatgacgagaaaatcctccctgccgtaaaagtcgctgcacgcgcgcacgccgccggccgtgccgcggggttcggattcgatgcggtatttcaggtgcacgccgtagctgctgccgtcgccgcagtgctcctgaatgacctccggccggtagcacagcgtcatgcacacgtccgtgaagccgttgcgccgcagcagatccagcagccggtcgagtaccggcacgccgacgagcggcaccatgggtttcggcaggcttccggtgatgctgcgcagccgccggccctgaccgccggccagtaaaattgctttcatgcgcacgctcctttcacgaatcttcagcaggaaagcgtcttgtcaatacggatagaatctgatataatcattgattatcataggggtaatagcttttgccccgcagggtgcaaggaggtatgacgatgcgagaccccaaagtcagcaatgtacccaatgaatccaagctgcagcgggcgctgatgcccaattcgcggatgtttctgctgtttctgatcgtgtttgcagtcatcacgttcttcttctccgaccggctctggctgtcgatctgcgagggcgtcatcattctgctgctcatcatttattcggtcatcatgcgcgcgcgcaagcgccgcacgctcgaacgatatattgaatccgtcacctatgatacggagtctgcacgaaataataccctgcagaatttcccgctgccgatggcggtctttcgtccggcagattcgcaggtcatctgggccaaccagaactttttcgatctctgcggccggcacaagccgacggtcgatatgcgcatcacggacgtgatcccggagttttccggccgctggctgctcgagggcaatacccagtgcccggagctgctggagtatcagggccataagtatcagatccacggcaacctcgtgcgcacgaatccggacgatgccgccagctacatgggcatcacctactgggtcgatgtcacggattatgaaaagatccggctggagtattacgcttcgcgcccgatcatcgccgtcatcgtcatcgataactacgatgagctcatccgcggcctgaccgaccgcaagcgcaacgagctgcgcgacgccattgaggacaagctcctgcagtggtgcgagggcaagggcggcttcttccgccgctacgaccgtgaccggtatctgtacgtgttcgaggagcggcatcttgacgagctgcgcgcgaacaagttcgcatccctgctcgacagcgtgcacgccgtgaccagcccgagcggcatccgcgccaccgtcagcgtcggcatcgggcgcgacggcgacagcctcgatgaatgctataatttcgccattctcggcaccgagatggcgctctcgcgcggcggcgaccaggccgtggtgaaaaaccgcgtcacgttcgaattcttcggcggccgcggtggcgaggtcgagcggcgcacgaaggtcaagtcccgcgtcatggccaacgccctcagccagctcattcaggactcgtccaaggtctacgtcatgggccataaattctccgatctggacacgctcggcgcggccgccggcgtctgctgcatcgcgcgcaagctcggcacgccctgccgcatcgtcatggatgcgaacaagacggcagccggccagctgcgcgaccggatgctgcgcgtgccggagtacggcaaagcgttcctgtctccgcaggaggcgtacctgcacgccgacagccgcacgctgctcgtcgtagtggacaccaaccgcccggatcaggtcgagaaccacaacctgctcgaggcctgcacccgcgtggcggtcatcgaccaccaccgccgtgcggcgacctacatcaccaacgcgaccatgagcttccacgagccgtatgcgtcgtcggcctgcgagctgatgacggagctgctcgaggagctggtcgagcagccggacatcctgcgcgtggaggcggaggcaatgctctcgggcatcatgctcgatacgaaggacttcaccgtccgcaccggcgagcgcacatttgaggcggcggcgttcctgcgccgcgccggggccgatacctcggaggtcaaaaagctcctgcagacggacatggagcacacggtctcccgctataagatcctgcagacggcgtctatctaccgcgcggacattgccattgccgcgcccaccgagccgcaggaccgcatcgtcgcggcgcaggcggcggatgaactgctcaacattgccggggtcacggcgtccatggtcatttatccgatgggcgacggggatgtgttcatctccgcgcgctcgatcggcgaactgaatgtgcagctggtcatggaggcgctcggcggcggcggcagccgctcgtcggcagccgtgcagctgcatgatgtgtcggtcgcgcaggcggtgcagatggcgcgcaaggcgatcgacgagaatctggaaaattaagcaaaggagtatcttgctatgaaagtaattttgaatgtggatgtcaagggccagggcaaaaagggtgaactcaaggaagtgtccgacggttatgcccgcaattatctcctgccgcgcaagctcgcgacggaggccacggccgacaatctcaacgccttccgcctgaaggagaaggccaaggcggcgcagatcgcccgcgagaaggccgaggcggaggaaaacgccaaaaagctcggcgccattcaggtgaagatcgcggcgaaggccggcagcaacggcaagctcttcggctctgtcacctcgaaggagatcagcgacgcgctgcacgagcagtttgacctcaccatcgaaaagcagaagatcgtgcaggccgaacccatcaagagcttcggcgcgtacgaggtcaagtgcaagctcggctatgaagtcaccggcaccatccacgtgctggtcatcgaagagaaataaaccgcgcgcaggcgagggagggacccgtcatggaggagctgcttggcagacagccgccccattccgctccggcggagcaggcagtcatcggtgcgatgctcatcgacccgagctgcatcccggacgtgatcgaaaaggtcaagtccgacgaattttatattcaggccaaccgcgatatttttgacaccatcttcgccatgttctcctacgggcagagcgtggacgcggtcacggtgctcgagcagatgaaggtccgcggtgtgtacaaggacacgacgcagcagtacctcatggaggtcatgcaggtcacgcccacggcggcgaacgtgctcaagtacgcggccatcgtgcgcgatcaggcgctgctgcgcaatctgcacacggcggccgatgagatcaacaccatgatctttgagggttccggcggagcggacgccatgctcgaggcggccgagcgcaagatctatgcgctccggcagggacgcaatgtcggcggcctgcagccgatcagcatggtcatccagcgtgtgtatgcaaacctctccgaggcggcgagcagcggcgggggcatccccggccttgccaccggcctgccggatctggatcagacgattctcggtctgaacgcgggtgagctcatcctcatcgcggcccgtcccggcatgggcaagacgagccttgcgctcaacattgctctgcacgtcggcaagacgtccggcaagacggtcgcggtgttctcgctcgaaatggcgcgcgagcagctcacgacgcgcctgctcgcgggcgagggcctggtcgacagccagaagctcctgaccggcaagctctcggcggacgagtggcggcgcgtcggcgccgcggccacgaccatcagcgcgacggatatccgcatcgatgacaacccgtcgctgtccgttgcggacatgaacgcccagtgccgccgcatcccgaatcttggccttgtcgtcatcgactatctgcagctcatgcagtcggccggcagcggccacggctggtcgaatgagagccgcacgcaggccgtctccgacatgagccgcatgctcaagatcatggccaaggagctcaatgttccggtcatctgcctgtcgcagctgtcgcgtgccaacgagtcgcgccagaacaagcgcccgatgctgtccgacctccgtgagtccggcgccatcgagcaggacgcggacatcgtgctcgcgctctaccgcgacgggtattataacaaggagtgcgagaatccgaacctcgccgaggcaatcatcctcaaaaaccgccacggcgagaccggcacgctcgagctcatgtggctgccggagtacacatccttcgcggccatcgagaagaagtacgacgacgatgactattgatgccatcatgcccggcgtgcgtgtgctgtgcgccgtgtccggcggggtggactctatgtacctcctgcaccggatgacggcgctgggcgcgcagcgcggctttgccgtcggctgtgcgcacttcaaccacgggctgcgcggcgcggagagcgaccgcgacgaggcgttcgtgcgcgcgcagtgcgagaaactgggcgtgccgttttatgccgggcgcggcgatgttgcgtccgtgcgcggcatgggcaccgaggccgccgcgcgcgagttgcgctatgcgttcttggcgcaatgcgcgcaggcgcacagctacgactggatcgccacggcgcacacggcggacgacaacgccgagacgctgctgctcaacctcgcgcgcggctgcggcctgcgcggcctgaccggcatcccgccgcagcgcggcaagctcctgcgcccgatgctggacacgacgcgcgcgcaggcggaggcgtatctgactgcccatgccatcccgcacgtggaggacagcacgaacgcggccgatgcctatgcccgcaaccgcgtccggcaccatgccgtgccggcgctcgagagcgtgaatcccgccttcgtgcagcacgcggccgacacggcagcgctcctgcgcgaggacgaggcgtttctcagtgggctggctgcggattttctggctgggcagatgcccgcggagggcatcccgatcgccgagctgctggcgctgccgcgcccggtgtgcgtgcgtgcgctgcagcaggcggccggacgggaactgtcgcgccggcatctgctggcgctcgagcggctgtgtgacggggaagggctcggctatgccgatgtgcccggcctgcgcgtgacgcgcgagcagggtcggctgtttttcggcgcgcaggcgctgccgccgctcgggacgcacattctgcgtccgggtgagacggcggagatcccggagctggggctgcgcgtcacggtcggcgtgccggaaccgtttcgtgaaattcacagcgcgttcaccactttttgctttaaatctgcgatcatccatgataaactatctgttacgccgcggcgtccgggcgaccggatccgtctggcggggcgcggctgcacgaagcgcgtgagcgacctgttcgccgaacgggggctgacacaggccgagcgcgaccgcgtgccgatcatccgcgcggcagatgcgccggcggccatcgccggtttcggcgttgccgagcaatgcgcggcggcgccggggcaaaccatgatctgcatccgaatggaacagatccagacatatgggggagaatactatgagcgatatgagagatgacattgcgtccgttctgctgtccgccgaggagatccaggcgcgcacggcggagctgggtgcccagatttccagggatttcgacggccgcgagccgctgtttgtcggcgtgctcaagggctgctttgtgtttatggccgacctgatgcgcagcgtgaccatcccgtgctcggtcgatttcatggctgtgtcgtcctacggcaaccagaccacgaccaccggcgccgtgaagatcaacaaggacctgaatcaggacatcgagggccgtgacatcatcctcgttgaggacattctcgacagcggcgtcacgctgcactatctcaaggactatctcagcgtccgccggcctgcctccatcaccattgccaccctgctcgataagcccgcccgccgcaaggcgccgatccacgccgcctatgccggctttgaggtgccggatgcgttcgtcgtcggctatgggctcgattacgcagaaaaataccgcaatctcccgtatatcggcgtgctcaagccggaggtctactccacctgagcgcccggtgcggatcccataaaggatgtgatttaatttgaaacctgataagaaccgtgccagaggcatcgggttctacctgctgatcggcgtgatcattctcgccgtcatcttctatctgaccactccggcagagcagaaggaatacacctattccgagatcgaggagctgttccgccaggagcaggtcaagtcgttctgcctcgagggagatgagctcacgctcaatctctattctccggacagcgatggcaatacgacgatcaaaaagacgctgtcgaatcccacgtggttccgcgaggatctgggtgatctgatcgagcagcagaccgccagcggcgtgctgacggagtatgattacgtcaagggctggacggcgccgtggtggatgtccatcctgccgtacctgatcacgatcgggctgttcatcggcgtgtggtacctgctcatgaacaaggcgggcggcggcggagcgccgggcgtcggcaagttcggcaaggcgcacacgcgcaccggcgaggacaacctcaagaaggttacgtttgccgatgtcgccggcgcggaagaggaaaaagaggagctgtccgagatcgtggacttcctcaagcgcccacagaactataccgcgatgggcgcgcgcatccccaagggcgtgctgctcgtcggccctccgggcaccggcaagacgctcatggcccgcgcggtcgcgggcgaggcaggcgtgcagtttctgtccatttcgggctcggactttgtcgagctctatgtcggcgtcggcgcatcgcgtgtgcgcgatctgttcgaccaggccaagaaggtcgccccggccatcgtgttcatcgatgagatcgacgcggtcggccgccagcgcggcagcggtctcggcggcggtcacgacgagcgcgagcagacgctcaaccagttgctcgtcgagatggacggctttacgaataacgagggcgtcatcgtcatggcggcgaccaaccgcgccgacattctcgataacgcgctgctgcgccccggccgctttgaccggcgcgtgtatatgggtctgcccgatatcaagggccgcgaggagatcctgaaggtccacgcccgcggcaagccgctgggcgacgatgtggatctcaagagcattgcgcgcggcacggccggctttgccggtgcggatctggagaacctcctcaacgaggccgccatcatggccacgcgcagcaagcgccgcttcatcatgcaggcggatatcgacgaggcgatcctgaaggtcgtcatgggcccggagaagaagagccgcgtcgtgtccgagcgtgcgcgccgcctgacggcgtaccacgagtccggccacgcgatcgcgtcgttcttcctcaagaactccgaccccgtgcactatatcaccatcatcccgcgcggcgctgccggcggcttcacctggtatcgcaaggccgaggacgctgagaacttcacgtcccgcggcgagatgtttgacagcatcgtctccgcgctcggcggccgcattgccgagcagctcttccttgacgatatctccaccggcgcgtccaacgatatccagcaggcgacgaacatcgcccgcgacatggtcatgaaatacggcatgtccgagaagctcggcccgatctcgttcgacgattcgagccacagcatcttcatcggccgcgatttcggcaccacgaagagctattccgaggagaccgccgccacgatcgacgaggaggtcaagcacctgttcgaccaggcctacgccaagtgcgaggcgctgctgcgcgagcacgccgacctgctgaccggcctcgcggagtacctgctcatccacgagacgatcgagggcgatgacttccgctactactgtgagcacggtgtgatgcccgtccacccggacgacaccattgagccgccggcgaaggtcatccgcagaatggacgaggcccccgagaccccgcagccggacgcggaagcgccggcccagccggaggcaccgtccgcaccggatgcggacgctccgaacagcgatcccggcgagcagctgtaagccgtccgcacgcaaaacacgatcacgatcaaaaggccgcagcgcatatgcgctgcggccttcttgctgcccggcgcgcggcgtatgcgccgcacactgtccggggaaacaacgatatctaaacgatatatagaagagccgccccctggaaaaggggcggctctcgctgttgctgcggcgcggacgcggctgcatccgcgccttgagtggggggaagaaaataggggtggatgtatagaaaggatggtgtgtggagcgtgttatgcgatcagaaggacgccttgatgctgttgatggtctcttcggcttccttgaccatgcggtcgagcagaaccttgaccggcacgacatcgtgcacgagacccatacccatgccggcgcagaagatcgcgctgtcgacattgccgtcctggaaggccacgcgggtcttctggccggtgatgacgggcatctgctccttgaggatgtccatcgggcccttgccggtgcgcaggccgcggttctcgatctcgttggcgagcagggaagcgttgttcttggacacgcgcatcatgctgccgatggtcttctggcagagtacggtgtccttttcggtgtggttgatgacccactggcggtggttgtcggagatcgggcactcatcgacgcacacgaagcgggtgcccatggcaacgccggaagcgccgagcgcgagcgcagccgcgaggccgtggccgtccgcgatgccgccggcggcgatgaccgggatcttcatgtccgcggcgcagcggcgcgcgatgacgaatgtgcctacgccgtcagccgacggatggccgccgacctcgtagccggcgatgatgacgccgtcgagtcccttgcgctccatactcatggagaccttgtagttcgggcacttgtggaaatgacgcatgccggcggacttgatgtcggcgatgaattcgcgcggatcctcggcgctcgtctcgatagcggcaacgtgcttttcgccgcacagacggatggtcttgcggatctcctcgttgtccagacgctgggtcggggcgagggagatgttgacgatgtagggcttgttggtcaggctgttcatctcgtcgagcgcgtcggcaaactcgtcgagcgtcggccagcaggtgacgttgatggtgccgataccgccggcgttgcacacggcggccgcgagctgcggcacggctagccactgcatgccgctctggacgatcgggtactcaatgccaaacatttcagtcagttttgttttcatgtatgctacctcctaatgatgtttaatggtttgaaaaaatgcgtctgtcgccttgctaatcaaaaatatatcaaagcggggcgggggtctcaacagtattcagaccaaagttgtggccgggcgcagcgacgtgttttggaggaaatgtacaaagcgcgtacggcttgcaaaaaacggataacccagcgcaatgcgcacccgtttttgtacaattcgggcggaaagtgtgcagagaatacctaatttaatacttgaaaatcagcagtatgtgtgttttccggccgcttggttatggagtacaaaaaaatgatttttctctctgcggatttcgtagtctttgttggtgaaaaagcgctgaattcggtgtaacctaaaaccaacttgacagataattaactaacgaaagcgcaagttgagaaccattcattaaggaggagtgaaactcatgagcaagcaaatgaaaaagacgattttcggcattctgggcggtattgtcctgatgctgctgatcgcctacctgccgccggaaacggaaatgatgagccgtcagggctggcagtatctcgggtgcttcggcttcctgctgacgtgcctgatctccggcgccctgccggactgggtcgcaacccttgcgaccatggtcatgctgctggtattcaaactcggcaaggtggcggacgtcacggtcgagttctccggcacgaccgtctggctgtgcatcggcgtgttcatcatgtcggtcggcatcaacaacagcggcttcatgaagcgcctggcgctgtgggtcctcacgaagttccccggcacctatcgtggccaggtcacggccatgatgctcgcgggcatcatcaccaccccgatgatccccagctcctatgccaagacctccatcatggcgcccctgatcggccaggtctgtgaggctgtcggcgcggagccgaacagcaaagcggcccgcggcctgtggtttgccaacttcatgggcacgtacatcctcggcattgccttcatgtccggctcggcgttcgttgcgctgatgatcggcttcatgcagggcctcgccttcacctggggctcctggctcaagtgcacgatcgtctggtatctcgtgctcatcgttctgacctatctgtactgcacgatcatctgcaaaccgaaagaaaagctcgccggcgacgtgaccttcctcaaggagcagtacaaggcgctcggcgccatctccaagaaggagaagcagggcatcatcatcgttgccatcgccattatcctctggatcacccagaagctgcacggcgtggacgccggcttcgtggccatcgcggctgacgtggcgttcttcgccgccggcctgctgacggcgccggaggccaacgccaaaggccagtggacgcttgtcgtcttcatcggcggcatcctcagcatcgccaagttcatgaacaccaccggcgtcagcgcatggctggccagcctgctcggccccatcttcgcgcccatcatgagcagcccgtatatcttcgttccctgcctgtgcatcatcacgtttgccctgcgttacgtgatcgtgtcccagacctgcatgctcacgatgatgatcgccatcttcggaccgctcatggaggcacacggcatgagcatgttcatcctcgtctttgtcgagtggctgtgcggcacgtactggaacaccgcttacggcaacccgtccgtggtcggcttcatcaagatgaccggcgacaagtgcgtcgactatccctgcgcgcagaaggcttcttacgcctacatggtcataacgatcatcgccatgctggccagcgtcccgctctggcaggcgatcggtctctgctgatccgaatatccccgtcagatccaccgtcccctgtgcagacattctctgcacgggggacactttccagatgcgccgctggtcaaggtgcctaatttcgccgctgcgatcggcggtcactttcgtagccggtgctctgggatgcggtgtgcagagttgatatagtagtcatagtcagaaaggtaacattccggcacattgccggtcatacacagcgtttgaaaggagaaaaacatcatgatcaaaaccagacttaccgagcttgtcgggctcaaataccccatcatccaggccggcatgggtccgtatccggtcaccagcctgtgcatcgcggcggccaacgctggctgtctcggcctgtgcagcacatttgccaccacgtcccgcgagaccaaccccatcgtctttgaagacttctgcaagcaggcacacgccgagaccaccgatgacgatgtgaccatcttcaagaaaatgttcacccgcgtgtttgaagagaccaaggagtccgacggtatcttcggcgcgaacgtcatggtctctgcggaggtcaaggccaatgccatgaaggtcatgcaggccatcaaggagctgcgcgaggccgatcccgagatgaagcgccgcttccgcgtgctcgtcactacggccggcgacccgatgccctgggcaaacttcgtcaaggagcagggcatgatctggatgcacgtgttcccgggtgtgcgcaccgcggcccgctgcaagaaggccggcgtgcaggtgctcatcgcctccggccacgagggcggtatgcacacggcgtggcagccggtgcacagcatgacgctgctgccggacatcatcgagaagttctctgacgagaacacgctcgtgtgcggcaccggcggcttctgcgacggcaagtcgatcgcggcggccttcgccatgggcgctgacggcgtgcagatgggcacccgcttcctcgccaccgaagagagcgatttctgcgaactgtggaagaagatggtcgtcgactgcgccgacggcggcacgatcattgcccgcggctttgtcggcccggcgcgctggctgcgcagcgacgtgtccctgcagcatgcttacaacaccgccaaggaagcccccggctcctacgtcggtgtgccggatgacttctcgagcatcccgatggagctgctgaccttcgagcgttacggtattgccgcgacctataagggcgacgtggagcacgccatggccggcgccggcgagtgcgcgcagcgcatcaccgatctgcccaagaccaaggacatggtcgagaaggtcatgggcgacgccgagaccatcatccgcggcctggcggcaaagtatgtcgccgactgagctctgcgcaagagaaaggagccagacatggcggaaatgaacgcagccttttttgaagaggcgaaatacaatctccagcacgggaagatcaacttcctgaacgtggccgggctcatcccggaagtcgctgaggagcgccatgtggtcgtgcgtctgcctgccaacagcatgcaccttaaccacgtgaacatcgtctatgccggcagctatttcgtgctggccgagtcctcgggcgccacgctgatcaagtgcacctatgccggcaagtatgtgccgatcatcaagagcgtgaacattgattaccgcaagccgaccaagcgcgacctgatcgtggacatctccatgacggaggaagaagccaaagagcgcattgcctatgtcgaagagcacggcaaggggcagtacccgctcgatgtgcccgttatggacgccgacggcgtgcattgcgccgatgtgcacatcgtgttctacctgatgccgaaaccgtaaagagcgatttttccctttgtttcccgcgccgcatccgcccgttcggatgcggcgcttttttcgtgccggaagcgcccgaaaatctatggcaacacagcacaaaaatgcacgtccgcaggggcaaaagaattgtaagaaatacaggtaacaagcgccgaaacaatcgttataatatagacaaagcatcggatccatttcatttcaacaaactgaaaaccgttgcaatttcagaaaaaatctgcatcaacaaggaggctatatccatgagaaaaccactcgagggactgttcgtggtcgagatgaccagctactggtccgcgacgacgacggcgcggttcctgcgcgacatgggcgcgcgtgtcgtgcgcgttgagaccccgcctatcggcgacttctgccgttactacggccgctctatgggcatgcccatcacggcggaagagaaccccatccacgatattttcaacggcggcaaagagtgcgtcgcgctggatctgaaagatcccaagaacctcaagctcatgcaaaacatgctcgccaaggcggacgtattcatcactagcacccgcacggccggcctgaaaaagctcggtctggactgggagacgctgcacgccaagtacccgaagctcgtcatgggtcaggtcaccggctacggcatcaacggcccgctggtcaaccgccccggcattgacgcgatcgcttatttcggcgccaacggcgtcatccttgacacccgcaccgatcccgacagcccgccgatctacccgcctgccggcatgggcgacacgacgaccggcatcacgctgctcagcggcgtgctggcagccctgctcgcagcgcgcgagacgggcgtgggcgactacgtcatgacgtccctgtacggcaccggcaacttcgtcaccgccggctttgccacgaactgcaactacggctatgagtggccgcgggaagcgcacaccatgagcccgcttggccagggctacaagtgccgtgacggccgctacatctacgtgttcgtcaacgactatacgagtgtctggccgaagtttgccaaggcgctgcgtctgccggaagaggtcgtgaccgacccgcgcttcacgaccaaggagtcgacgacgatcattgccaaccgctccgcgctcgtggacatcatccgtgagtacgcgctcaagcgcgacgcgcaggatatcctcgacgagctcgtcgcctacgatgtgccgagctgcatccttaaccagtacaaggatcgcttttccggcgagtggctcgagcagtcggtctccaacggctacctgatcgagcacacctatccgtcgggcaacaagacgtatctggcgcagatgccgatctattttgacagcctcggcgtgcaggatctctatgcacagcacagagcgctgggcgcggacaacgaagccatcgagaaggaattcggcgacggcgaataaaagcgcatctcccgatcaaaagcagggccgcaacagcggccctgcttttttgcgtctccgtggtcagaacggcaaaaagcgtccccatctgccgggcagacggggacgcgccagtgtgctgtattttcgcgtgctcagcggtttttcagcgcctggatgagcaccttgccggtggcgttcttcggcagctccggcaagaattccacctcacgcggcatgcggaacgacggcatgttggcgcggcagaatgtctgcacctgctcgaccgtcagtgaccggccgggcttgcagacgatgctcgccttcacgtgctcgccccacttcgggtcgggcatgccgtagacggcggcttcggcgatctcgggcattttcagcagcacgtcgatgacttcctcggggtagatattctcgccgccggagatgatgagcgaatccttgcggccgcgcaggtagagatagccgtcctcgtcgagatagcccacgtcgtgcgtgaaataccagccgtcgcggatcacgtccgcggtcttttccggcatctgatagtagccgagcatcatgccctgcccgcgcacgcagatctcgccctcctcaccggcatcgcacagcgagccgtccggccgcacgatgcgcacggcggcgccgagcagcgcccgtccgaccgaggtgagataccgtccgccgaggatcaggtgatcctccgggagcagcgccgtgacggtgctggccatctccgtcatgccgtaggactgataaaagcggcagttgagccggtcgagcgcgcgccgcagcagatccggggaaatggggcaggtggagtagttgatgaccttcaactgcgacaggtcgtagtttttgcggtccatctcatcgaggatgccctgcagaatcagcgggatgacgccgatggcgcgcaccttttcccgcacgagactctccacatagtcgctcacggtgaagttcgggatcatgatgagcttaccgccagtcgccagcgtgagataggcgccagtgcacgcggagtggaatagctgcgagatgtactgatagacctgcccgtccgggaactccagcgtttcaagcatgctctcaagctgattgagatagcgcgcgtgggagtagaccacacacttcggccgcccggtcgtgccactcgtgtgcatgtggtaggcaggggcgtcgggcgcaacgacggtctccaccggcgtgtccggcatacctgcgagcagggaatagagggcggagcggccgtcggcttccggcgtcagggacaggaacgtgatgcgtccggcatagtgctgccgcagggcgtcgccccagtcctcgcgctccggcttgaagaaggcgcaccggacctcgttgagatcgagcaggtaggtcatttcttccggcgcgagccgccagttgaacttgaccacggtgccgcccagcttcaggatcgcaatttccgcgatcatgacctccgggcagttgcgcgagatgatggcgacgcggtcgcccggcgcaatgccgagactgcgcaggcagtgcgccgtccggtagatgagtgcctgcagttcccggtaggtgatgcgccagtcgccgaatacaatggcctcacgctccgggcagcgtgcaaagctctcgtcgaggatctgaccgacgccggtcgttttttgaaatctgctgatgttatccatatctggctcgctcctatacaaaatcattcgaacgttccgacggcttgttaatttattatcttattcgcattatatcgaaccaccgcggacaggtcttcataggagactacgaatttatgcgccgcccgggtgtctgcttttaggcaaaatgaaagcagcagcgccctttacgcgcacgcaatcgtaggaaatgcacagtgcgcggcggcgagaaaaaccgcatttcgtaacaaatgccctgaacaattcgccgtgatattgttacaataaagacaaagatgaggcgaaaaagccgcaaaaacacggagaattcggacaaaagcgcgaaagttgcgccaatggcttccaatttcatcgtagaagtctccaaaaattcggatctccggtgtttttgcggaaagggacttttttcctcaaaatttgtgtgggaatatgcacttgtgactgccgttttgcgcagcacggaaaggagagaatcatgacgctgtccgtggaaatgatcgccgagagcatgcagccgttcggcgcgcgggtcgtaatgcagctggagcggacatttgccttccgccgggtccagatgctcacgcccgagtccgagaacacgctcgaggaagacgtgctctacgtcagcgagccaaaggtgatccgccgcttaccgaaggggctgctgcacgaccactttttcgttgtccgggcgcgcccggaggatgcggagcccgttcgccccggtgtcaatgcgctgctgtatgacgaacagtattctctcggcgcggtgacgaaccacctgctcacactgtttgaccgcctgcagacactggagtatcagatgcgtctggccgtgcgcgcgcacgccgggctggagccgctgatggaggtcgggcggaagatgatcccggacgcgacgatcgtcgtcgtcgactcggcgtataacatcatcggcgccacgcgcgagcgcgggtcgggcaatatctatgtcgatcagatgctcgagcagggctattacgacaaggactcgctgcagctcatggcggaggccggctattttgaagtcagtgaccggtacctgcgtccggtgctgtcggtgccgccgaatatctgcaacgaccccgtgatcctgcgctcctacattgccaacgggatgttttattcctttgccggttgctatttccctggccggctgccgacgatggtggatcaggagctgttccgctgctttaccgagcagctcgaccattacttccgcgagacgggcttttacagccagagcatgccgcagcgccagcagatgatccatgatctcctgcgctatggggaggagaatccggagctggtgcgcgaccgtgcgcgcggcctgcgcctgccggagacgggcgacttccgcctcggctatgtcgagttcgacgagcaggcgtccacctcgaaggcggggtacatggtgctgcagctgcgcgcgtggagcaacgtggccaattacggcgtgatgcagtatcaaaacagcgtgctcatcctctttcaggactggcacgattacccggtcggggagcagcttttgttccgcgagcggtgggacgagctgctgacgctgctgggcaagaaccatgcgcatatcggcgtgagcctgctgttcacggagctgggacgcctgcgcatgggctacgatcaggcgcggaccgccatcgagatcggccgcaagctggatcccgatgcgctggagtatcactattccaagtattatctcaacgacatgctcgaatgctaccgggaaaaattcgcgctcgatgacgtcattgtgcgctatctggatcagcttgccggggagcgcggctacagcaacagcaacctcctgctgctgtaccactacctgaacacggagcgcaacatttccctgaccgctaagcgcgtgcacatgcaccgcaacagcgttatttaccgcctgcagcgcattcaggacgtgctcaatctcgacctggacgacccggatgtgcgtctgcggctgatgatcacgttcaagatcctgcggatggagggcaagctcccggagatcacggacgagccgccggagccggacaacggcggaagcgaccgcctgacgcttgtggaatgagcccgcgaaaagagaagaacagcacacggcagcgcctcccggggcgctgccgtgtgctgcttccgatcggggtcaggtctgctgctcggcctgtgcctgcagcgcgcgctcgcgggctttgcgctcgcagtgcgcgtagtagctgttgcccatctcctcaaatttctctttcggcagcagcagctcttcgagcggcttgcgcgtcttcggcaggatcgtgccgtagctgccgtagtcctcgccggcctggcggacatagccgaggtattcttccacacgctcctgcagcggcggcaccggcatcatctcgccctcgccacaaaagagcgtcgtgtagttgcccacgccgagcatgaggtcaaactgtgcgagcacggcgtcgtagttgcccttgggggagaaaaagccgcaggtcgagatcagcacatgccgctggtgcgactggtcgtagcgcgtgacgtgcttaccgttgcccttgccgtcggtgcggtcgcacatgacggggcggttgatcggcaccgtgcggtcgagaaagcacttgagctggccgggcagggcgtagtagtagagcgggaagctccacacgacgaggtcggccgtgacgtagctttcgatcgcggcggccatgtcgtcgtcgcggaagcacttgcccggcgtgcgcttccagcagttgaggcagccgaggcacggctcaatgtgcattttggccacggtcagttcttcgacctgcgtgtcgcaggtcttggcgagcccttcgagaaaggcgcgcgtcatgcgcagcgagttgctgcgctccatgcggggacttccgttgatgacaagaatgttcatggacgtttcctcctggtttattcgcacgtgtagcggccggggcgcttttcgagcatggcggcggccgcctcggccttgtccttggtcgatacggtgtagatgccctgaatctcctcggccagcaggcccacggaggtgccggcgtcggtagcgatgttgatgcactttttgcacatctgcacggcgatcggcggcttggccgcaagcttttcggcataggccagcgtcgtctgctccagctcgccgagcggcaccacgcgctccacgagccggatgcgcgcggcctcctgcgcgtcgatatcctcgcatgtcatggccagcagctttgtcatgccggggccgatgagcttggtcaggcgggtcgtgccgccgagatcggtgctgatgccgacgtcgacctcccgcagggaaaacttcgcgttgtcggcggcaatgcggatatcgcacgccgtgatgagctcgatggcggtgcccatgcacgcgccctggatgccgaccacgaccggcaggttgcactcgctccagaagcggtaggcctgctgccagtgatagacgccgtagaggctgcgccccggcttgccgatcaccgctttggcgtaattgaggtcgatgccggcggagaagtgccggccgtctgccagcagcgcaatggcgcgcaggtcgtgatcgccgacgatctcggtctgctgcagctcgatcatggcctcgtaaaacggggcgctgatggtgttgagcttttccggccgcgcgagccgcacgatgccgacggctccgcgccgctcaaagctcagaaattcctgataggacatggtctggctcctttctttatgtctttatgcctgctccggtttccggcgctgacgcagcgcctttgtcagagcgggtacgatctggaacaggtcgccgacgatggcgtagtccgccacttgaaagatcggcgcgttcgggtcgcggttgatggcgatgatggtgtcggatgcgctcatgccgatcaggtgctggatcgcgcccgaaatgccgcaggcaatgtagacgcgcgggcagacggtcttgcccgtctggccgacctgatggatgggggagatccagccggcgtcgactgctgcgcgagatgcgcccacgcagccgccgacggtgtcggccagctcctgcagcagcgcgaaattttccggtcccttcaggccgcgtccgccggagacgatgatctgcgcctcggtcagattcgcggtcgcggcgtcgagcaccgggatcagctccagcagctccgtgctgctccgccgggtgtcctccggcagcgattccacaaagaccgcgccggtgcgcgcggggtcaaatgccggcgcgcggaacacgttcggccgcacggtgcccatctgcggcttcgtgtcggggcagatattggtcgccatcagattgccgccgaaggccggccgcgtccagagcacgcagcggtgcgcgtccacgtcgagatgcgtgcagtcggccgtcagccccgtgtgcagccggcaggagatgcgcggcccgaggtcgcgccccacgttcgtcgcgccgatcatgagcacttcgggcgcgtatttgcgcacgaggtggcacatggcggcggtgaaaatgtccgtattgtagtgcgccagggcgggatcttccatggtgatgaccgtgtcggcaccgcagccgatcgcctgcgcggcgagcgtgccggcgtgcgggtcgagaatgacgccgacgagctgttcacccatcttgtcggcgagcaggcgcccctgtcccagcagctccagcccgacgctgcgcagctgcccgtcctccgtttcgaggaagacccagacgtgtttgctctcagacatgatccccgcctccttccagcgagatgtgcgccgcgtcgagctgcgccagcagggacaccgcggcggcctccggctgcgcgccgtcgatgcgcacggtctgcttggtgcgcacgggcacgaatgttcttgatacctttgtcggtgagccgtgcaggccgatgcagtcgggatcgagtgccggcagatcgtccgccgtcagcgtctgcggctgcatgcggttggcctgcagcttgcgcatgacgttcggcagccgcggctcgttgatggccttcacgaccgtgaccacggccggcagcggcgcgcgcagcacgcggtaggcgcgctcgccctcctgccggatgcggatcgcgccgtcctcgatcgtgatggcgcatgcgcacgtgagctgcggtagccccagatgctcggccaacatggggccgacctgcgccgtgtcgccgtcgatggcctgccggccgcagaggatcaggtcaaagccgccgagcgcccgcacggcctgtgcgagcgtgtagcttgtggcataagtgtccgcgccgccgaagcgccggtcggacaccagcaccatccggtcggcaccgagggcgtagcactcgcgcagcgcctgcgccgcctgcgccggccccatggtcatggcggtcacggtgccgccgagcgtctcgcggagctgcacggccgcctcgagcgcgtatttgtcaaaggggttgacggtgctcggcacaccggcgcggatgagggtgttggttttcggatccatgcggatctcggtcgtgtccgggacctgcttgatacagacgagaatgttcacgcggcaccgccctcagccgagcagcgtcttgccgatgacctgacgctgcacctggttcgtgccctcgaagatgctgtagatgcgcgcgtcgcgcagcagcttttccagcgggtattcgcggctgtagccatagccggcaaagacctgcaggcccatgttcaccacgtcgtagcacatttccgaggcaaagcatttgagcgagttgccgagcgtgccgatcgggatgccggcgtccgtcatctgcgcgccgtagaccgccatggcgcgcgaggcctgaatgcgcatctccatgtccgcgatcaggaactgaatgccctcgagttttgcgatcggcccgtgcttgaagctgcgctccctggcgtagtccacggccagatccagcgcgcgctgcgccacgccgacggcgcccgccacgctgaccgggcgtttgccggcgaggaatttcatggtctgggcaaagccgttgccctccgtgccgatcaggcggtcggcggggacgaacacgtcctccatcacgaaatccgccgtgtccgacaggcggatgcccatcttgtcctcgtgcttgccgacgctcaccccggcgtcgcttttttccaccagcagcaggctcatgccgtgatagcccgcatccggattcgtcacggccagcaccacgcacgccgagcagagcgtggcgttcgtgatgaagcacttgacgccgttaagcacgtagccgccgtccactttctttgcactcgtgcgcgtgctgccgacgtccgaaccgctctgcggctccgtgatcgccatggagatgccctcaccgcgcagaatgcgcgcgcaggcggcctgcttttgcgcctccgtgccgtcggcgaggatcgccgacaggccgaacgagtaggaattgttcgagatcgtgaagccggcgtcatgcttggccagctcctcgctgatgcagtagcgcgtcacggcgttgagtcccagtccgccgtactgctccggcacgtccagaccaaacagacccatttcaccccatttttcgtgtagctgcaccggaaattcgcccttttcatcatattctttcacgaccgggtcgagctcgcgctcggcaaattcgcggatcattttgacgatatcctgctgctccggcgtcatgccgagatagtaaccgtatttgctcatgaaaatcttgctcctctcacgggaaagcacgtactttcccaactttgattacattttaacgaggcgcgcggcacggaacaacgtcattcaaaacgacgttttttcccgccgccgcacaagcgactgtgcagaaatgacgaaaaaaagcgcccgctttctcctgaaacaggagaaagcgggcgcgaaacggtggtcactcttgatgcacgatgccgctgttgccggcatcgttctcgccgtgcggcgtttcccagtgcgggatgcggccggtcatttcgaggatcttgaacgagatcatcagccgcagacggacatccggatcgtcgagatccagcgcgagaatgtcctggatcttctgaatgcggtagatgacgctgttgcggtgcatgtgcacatgcttggcggtcagggagatattgcgctccgagcacaggaagtaatacaggagcttgatgttgctgcagacgctgttgttatcgtccatgagccggtccagatagtgcgtataggtgtcttcgaggggcatggtgtcggcataatgctcgagcatgtcctccagatagtatttcgagtagaaataggcggtgccgtccgtatcacggcgcttgccgatattcgatgcggcttcggcctgccggtagccgacgtagagcttcgtgacgtcgctgaacagcaggctgatgcccatgcaggccttgttctgccgcagggtggtcagcagggcgttccagtcctcggaaaagccggactgcatgcgcacgtttgcgtcgttccagtcgcggaagaggatgatgacggacgagccgtactggaacacgccgtagtttgccagcgggcagtgggcgcggagctgattggagatgtgtgagactttgaacagggtcgagctctcgcactgcacgaggccgatgcggaacgtgccctgatagggaatgttcagctgcgcgcagcggtcgtggaaatattccggcgagttctgcttcggccggatcagatcgtcgagcagctgctgctgtttgccgagcatgccggcgtcaaaaatgccgttgactttatagtaattttccagctcctgcgtcaggcaggtgtagagcgagatgtcgcgctgcgtcggcggcacatcgagaaaatagcagccgatgaagcagtaggccgcgccgtgattcttgtaggagcggacgagaaacgggtacccgcagatggtcttttccgccgggtagagcaccggctggacgcacttgcgctcgtcctcatagtagccccagcttgcgatctggttcatatcctcacggctgtaatagccgcgctggagcaggtcgcggaaataggggatgtcatcgacggagctgcgcgtggagcacacgatgttgtatgccgagtccgtgacgacgatcagacagtgcgggaacgcctttttggcgatctcaaaaaacggctcgtagccgcgccgttcgagagaggcctccttgatggcaaactcaaaggcgtgaaactgtgtaaagagggtaatgagccggttgacgacctcgttgaggtcggtgttttcgtcaagcaggatgccgtgcagcgcatgatggcactgcagctgggacggcttggccttgaaaacgaagcagtggttttcaaaaagctgctttttcagctttgggagcactttcggtgtgcagacatacagcgtgtccggctccagaatatccgtgggagaggtcagaatctgtacgccggtgaaggtgaaatcgccgtcggtctctatcagttgtgcgccgtattccgtcagggtttccaggatcagttgcaaagacaatttcattcagaatccaccacacttccatttttctgtccccgggacgggggctgattgctgatttgcaaaaaggggtgccgtccggcacccctttggccggtcgtccggcagtgatctgcttacttgctgaattccgcgaacagcgcgtcgttgtccgcgccgatggatttgctctgcgcgaagtagttctgcacgccgacgctctccatgtagatcgggatctgcggctgatagtagtgcttgccgctctcgtaggtgccctcgccgaggtagccgttggacaggcactggtcgagctgctcctgctctttgtacttgtcgccgatgccgcgcagcacggtgcagggcacgttgccggcctggagcacgctcatgatctcgtcggcggtctttttctttgcttcctcgatgcagcgcgccacgatgatggcacagttgccgttgacgttcagcgccgggcgcgtgttcacacgctcgtcgtcgagcatgtcctcgatgttgaaggctttgcagaagacggggaagtagcgctcgtactcattgacgaagatctgcacgaacttgccgtccttcgtctcgaacgcctggcccatggggctctgcgtgaagcgggagcgcggccaggggttgaagtactgcgtgccggagttgatcgcggatgtgacccagttgccggtgccgtagagagaggcggacacataatcgcccttaccggtacgctcgcgggcaaacagcgccgtcatgatcgcgccgaacagcggcatgccggtcgtcaggtcgcccatgccggtcggcgggcagatcggggagtcgtccggattcaggcgcaggtcggagatcaggccgttcatggcgaagaatgccacggcgtccaggccgggggcagcggacagcgggccgtccttgcagccgtagccggtggcgtgcgccatgaccaggcgcgggtatttctctttcagggtgtcatagtccaggttgtgctttttcagaccgccgagacgcatgctcgtcaggaatacgtccgccttggcgagcatgttgtgcagcacgcgctcgtgctcgggatcgttgagatccatgtgcatgaattccttgccgccgttgaagaggtcgaacgaggggttctcgttcgcttcgatcggcatgccgcaggtgcggccccagtagcgaaccgagtcgcccgctttgccggtctcgatcttgacgactctggcgccgaggcagcgcagaaactcacctgcggagggggcggcccaataggtcgtcagctccacgacgaaaagaccttcgagtggtttattcatattgtatcaacctcctgtatttttcagtccatcctcatcgcacgcacgaaagacaacaaaaatgcgcgaaagtgacgaatgactgctttttaacaattccaattatacaggtggccgactgcaaacgaaaagggcaggagttacgaaaaaagtgtgcgtatttgcacaaaacctgtgcagaaacgacgattgcatatccccgggaacgcttgaaattccaacaaaaagcgcgactgtgcaatcgctccgaaaacgccgccgtgaaagtgacgattcatgtgcaaaaacaacgacggtcgtttctggcggaatgacggtgtgcgtttttttcaagcacgttaaaatataaacgttaaatccgaaacgcgcaagtaggttctttccattttggccgtttcgggagataattcataattttataaagaatagaaccatgaaaaagaggatcggagggatcacccatgcgggaaattgctcagaagctttcacggtgcagcagctttggcgcgctcatggatgatgcgttcgcgcgctgcccggagcgcgaggccattgtatacgaggactggcggctgacctatggcgacctggagcgctacatccaccagacggcgcactatctgcggcacctcggcgtgcgcaagggcagccgggtcgcgatcctgtcgcgcaactgcccggagtggatcattgccgagtttgcgctctatcagctcggcgccattgtggtcaagatcaactggcggctcacgccgccggagcaggcgcgcatgctcgcgcgcaatcaggtgtcggtcgcctttctcaaggcggagaagccggagtggggcgcggagctcgagcgactgtgcgcggacagcgtacgcctgatccggctggagccggtcgacggccgctcggcgctgtgcgcgctcgtcagcggcgagccggacacgccgccggacgtgccggtctcgcgtgacgatgtcgcctgccgcctgcacacgagtggcacgacgggggagccgaagtgcgtcgtctacacgcacggcggcatgctccgcgagatcgtgagcatgctgcaggtctatccctacccggacgggcagcggtatcagttcattgcgcagctgttccactcggccgccatcggtgcgcacctgtcgcttgcgaccggcggcacgatggtgctcaaggatcatttcgcgcttgaggattacatgcacacgctcgtgtccgagcgcatcgagtccatcagtgtcgtgccgacggtgctcaagtggatcctcgacgagacggacaacggggactatgatctctcgcacctcaagaccgtcaactattccacctgcccgatcccgaaggcgctgctgcagcgcgcgatcgagaagctgcactgcagcttctatcagtcctacggcatgacggaaatgggcagcaccgtcacggcgctgctgccggaagaccacctgcgcgacggcggtaagtacctctcgtccgtcggccggccgatccccggcgcggccgtgcgcatcgtcgcgccggacggcagcgattgcccggcaggcaccgcgggtgagatctatgtgcgcggcccgggccggatgctggaatatctggatgcgcccgagacgacgcacgcggcgctggtcgacggctggtaccgcacgaaagacatgggcatgctcgacgcgcaggggtacctgttcctgagcggccgtgccgacgatctcattatttccggcggcgagaacatctatcccggagaggtcaccaatgtcatcatgcagctttgcgacgacgtggccgaggtcgcggtctacggcgtgccggacgagacctggggcgagcacgtgaaagcgagcgttgtgctcatgccgggcagccggctcacggcggaggcgctgcgccagtattgccgcgcgcatatgccgacgttccgcgcgccgaaggagatcgagatcgtgccggagctgcccaagggcgcgaccggaaaagtgctcacggccgtgctgcgcgcgcgcagtgtccaggcgagctgacgcgcgcatcttgtaggccgtgcccatccggcgcacggcggcaactgctgttttttggagaaatcagcgttgtgaagcgactgacggtttgctattgtgaaatcacaaacaaccagacgccgcacagcggcacacgtgaatatttcaggaggtaatacctatgatccgtaccaaacttaccgaaatgctggggatcgaataccccatcgtgcagggctgcatgcagtggatttcccgcgcaccgctggtcgccgccgtgtcggaggccggcggcctggggctgctgtcgtcgagcacgttttcctcggccgatgagctgcaggcggagattcgcaagattaagtccatgacgaacaagccctttgccgtcaacctcacgctcatgccgtcgctcgtcgtgccggactatgcgggctacatccgcgtctgcgccgaagagggcgtcaaggtcatggagaccgccggccgcccgccgaaggacgacatggtgcgcgccatcaaggacgccggcatggtgctcatccacaagtgcaccaccgtcaagcacgcgctcaaggcgcagtcgctcggcgcggacatggtcgtcgccgacggctttgagtgcgccggccacccgggcgagaacgatctcggcaccatggtgctcacgccgcgctgtgtggaggcgcttgacattccggtcatctgcgccggcggcgtttcgaccggccgccagatggcagccgcgctcatgctcggcgccgaaggcgtgtacatgggcacccgcttcctgctgtccgaggagtgccccgtgctcccggccgtgaaaaactacctcgtcgagcacgccaacgagatggagacgatcctgcttctgcgctcgttccagaactccacgcgcatgtataagagcgaagtcgccaagcgcgtctttgccaaggagcaggccggctgcgaattcaaggatgtggccgaggacatggccggcaagacggcctgcaagatgttcttcgagaacgcggacgtggaaaactgcggcgttatctgctgcggccagacgtccggcctgatccacgatgtgctgcccgtgcagaccatcatcggccagatgatgcacgagtgcgaggcgaccatcgcaaagttcgcctgactttggtaatccccccattcccttcttttttctttggagcggctcggcccccgggccgggtcgctccccccttattatcagaaatggagatccgatcatgttctattcgtttcatggaaaatgcccgcgcgtcgatcccacggcgtttgtcagcaccagcgccgagctcatcggcgatgtgacggtcggcccgcggtgctatatcggtcccggcgccgtgatccgcggcgatgccgccgagatcattctcgaggaggaggtcgcggtggaagacggcgtcatcatccatgccggcggggcggacaagcgctgcctgctgtcccggcgtgtgaccatcggtcacggggcgatcgtccatgcgcgctatctcggcccggaggccagcatcggcatgagcgcggtgctcagccttgggtgcgcgatcggtgccggcagcgtcgtggcggagtccgcgctcgtgccgcagggcaagtccgttccgccggagacgctcgttgccggcatcccggccaagcctctgcgcccgctcacgcaggcggaccgcgagagctggcaggccacgaaggactggtatgtccggctcacggcggcgtacctggatccgaatcatttctttcccgttgcaccgcgggaggcgtgagcacgatggattggcgtgagatctatgcgcgcaggctctgcacgccggagcaggcggcggcgctgatcgcgcccggcgaccgcatctttgccggcggcgccggcagcttcccggccgtgctgatcgacgcggtgagcgaccgcgcggagctgcgcgacatcccggtcgtgaccgtcgtcaacggcacggagagccgcgccctgtccgacccggcctgctttgcgcgcacgccgtatcactccctgtttctcggccgcgccgaccgcaagtttcagcagcgcggcggcctgcacgaaaactccgtgcagtttcaccagaccgtgcgcgcagcgcgcgaggtctaccgtgtcaatacgctgatgctcgaggtgtccgagccggatgcggacgggtatctgtattacggcccgcgcggcacggcctggagttcgctcgatacacaggtcgaaaagcgcatctatcaggtcaacgcctttcagcagcgcacccgcggcgagcaccatcgcatccatgtctcggaggttacggcgctctgccgcgcggatcatccgctcaatacctatcattataaagcgcccgatgcactcgatgcgcgcattgccgcgcacatcctgccgctcgtccgggacggcgatacgctgcaggtcggcatcggcggcattcccaacgccgtcgcctacgggctgcatggacgcaaacggctcgggatttacacggaggtgctcacacaggcgcagctgcgcctgatggccagcggcgcggtcgatctcgatcgggtcgaggcgtccatcgtgctcgacgcggcggggcatctggatgattttgcgctcgcgcacatccgcatgatcccggtggacgtgctcaacgatccgttccgtgccgcgcagcagccggggcttatctcggtcaacggctgcctgatggccgatctgaccgggcaggtctgcgccgaggccattgacggccggcagtattccggcgtcggcggtcagctcgattttgtccgcgccgcggcgcgttctgtcggcggacggagttttctgtgcctgcattccacgcacgaagcgcccgacgggacgctcacgtccaacattcgcgcgcatcttccgtccggtgcagtcgtcacgacgccgcgcagcgatgtcatgtacatcgtcacggagtggggcgcggccgatctgcacaatcaaccgctggagacgcgcatctgcgccatgatccgcatcgcgcatccgcgctttcgctgcgcgctcgcacaggaggcagtcgcctggggacaactgtcaccggagtgcgccgcgcaatttgatacacaacccgaaccagaggaggaggaaaccacatgaacctcgcatacgaaccgctgtttacaccgttttcgatccgtaatacgcgcattaaaaaccgctacttcatggccgccatgggcacggtcacgcacaacgatgaggacggtgcttacctgccggacgccgtggactatttcgtccgccgcgccgccggcggcgtcggcctgatcatcacgggcgccaactgggtggacaacaacattgaggtccacagccccggttctttcccgtgcccgacgatctgccccgggaaatacatcaaggccgcgcgcgagctgaccgaccgcgtgcacgcctttgacaccaagatcttcgtgcagctcacggccggccttggccgcagcgccatgcccgccatgatccatgaccgcaagtttgtcgcgccgagtacgatcagcaaccgctggaacccgcgcatcgagtgccgcgagctgacgacggaggaggtcgagcggctcgtggagcagttcggtgtgtcggctgctatcgccaaaaagtgcggatatgacggcgttgaggtgcatgccgtgcacgagggctatctgctcgactgctttgccatgtcgctgttcaacaagcgcacggacaagtacggcggcgatctcaacggccgcctgcgcttcgccatcgagatcgtgcagaagatcaagcagtactgcggcgagaatttcccggtcatcctgcgcttttcgctcaagagctatatcaaggatctgcgtcagggcgcggtgccgggtgagacgttcaccgagctcggccgcgatacggacgagggcctgcaggcggccaggatcctggtcgatgcgggctacgacgcgctcgatgtcgatgccggcacctacgatagctggtactgggcgcatccgccgatgtactttgacaagggcgtctatctgccgtttgccgagcaggtcaagcaggtcgtggacgtgccggtgctggctgccggacgcatggacgatccggatctggcggcgcaggcgctgcgagacggccgctgcgacatgatcggtctggcgcgtccgctcctgaccgagcctgactacgtccgcaaggtgcgcaacgacgagctcgcgctcatccgtccgtgcctgtgctgccacgagggctgcttcggccgcgcgtttgacggcgcggtcggctcctgcgcggtcaaccccgagtgcgcgcgcgagcggctcgtcggcatcgcgcccgcagcggagaaaaagcgcgtggtcgttgtcggcggcgggcctgccggcctggaggcggcgcgcgtgagcgcgctgcgcggccatgatgtcacgctgctcgaagcgagcgatgccctcggcggcgcgctcaagccggccggtgtgccgcacttcaagcaggcggatcgtgatcttgttgcctggtatgccgccacgcttgcgcatctgggcgtggacgtgcgcctgaatacacgcgcggataaggcgctgctcgattccctcaagccgcagacggtgttcgtcgccgagggcagcacacccagaacgctggcattgcccggtgcggacggagacaatgtggtcagcgcgctcgacgtgctcgagggcaaggcgaaagccggcaagtcggtcgtcatcatcggcgcgggactcgtcgcctgcgaactggcgctgcacctggtgcaaaacggccacaccgtcacgctgctcgcccggcgcaagctcctgcgctcggccaagctgccggccatgaatgagctcatgctgcgcgacctgctcgtgttccacggcgtgcacatcgtcgagggcgcggcgctggaatccgtcgatgccaagggcgtttattacgaggtcgagggcgtgcccgcgctggcggagggtgacacggtcatcacagcggtcggcatggaggccaaccatgcgctctttgacgcgatccgcgatgactatgagaccgtgctcgcgctcggcgacggccgccgtgtgcgcaacatcttcggcgccatctgggatggctacgaggcggcacgcagtctgtaattgcgatccaaatacgtttgcccgggcaggttccacctgcccgggcgttgtgcttgcatccggcggctgtgcatgataaaatcatacatcttttatttgaatggagagaccattatgctctatacctttggcggaaaagctccgcaggtcgacccgacggcgttcgtcagtgcgagcgcggagctcatcggcgatgtgatcgtcggaccgcgctgctatatcggcccttatgccgtcatccgcgccgacgcctcgcgcatcgtcctcgaggaggaggtcgcggtcgaggacggcgtcatcatccacaccggcggggaagatcccgtcgtgaccatttcgcgccgcgtgaccatcggccacggcgcgatcgtccacgcgcgtgtgatcgggccggaggccagcatcggcatgggcgcggtgctcagcctctgcagcgagatcggcgcgggcagcatcgtggccgagtcggcgctcgtgccgcagggcaagatcattccgccggagacgctcgtcgcgggcgtgcccgcaaggccgctgcgcgagctgaccgacaaagaccgcaccgactggcgcgggacgaaggactggtacgtgcgcatggcggcacagtatcttgacccggacaactatcatccggtcaagtgacggcttgaaatgcccgggcacccatgctataataaactgctatgtcagccgcggccgcggctgggaaacgaaggagatgctcggatctatgaaactcggtatcgtcggcctgccgaacgtcggcaagtccacgctgttcaacgccattacgaacgcgggcgcggaagtcgccaactatgcgttctgcaccatcaacccgaacgtcggcatggtctccgtgccggatgtgcggctggattatctggctgagatgtatcagccaaagaaaaagacccctgcggtgatcgagtttgtcgacatcgccggcctcgtcaagggcgcgtccaagggcgagggcctcggcaacaagtttttgtccaacatccgcgccacggatgcgatcgtgcacgtcgtgcgctgctttgacgatgaaaacgtcatgcacgtcgagggttcgaccgacccgctgcgcgacattgagatcatcgacctcgaactcatcatggcggacatcgagatggtccagcgccgcatcgacaaggcggccaaggccggcaagagcggcgacaaggcctgcctgcacgaggcggatgtgttccgcggtctgctcgagcatctcaacgacggcaagagcgcccgcacctatgactgcagcgacgaggatcgtgccctgctcgagacgagcgacctgctgagcatcaagcccgtcatttacgccgccaacctcgacgaaaatacattcgccgccgggtatgaagattgcaagtactatcagcaggtgcgcgatctggctgcgtctcagggcgcgcaggtgctgcccatctgcgcgaaggtcgagcaggagatcggcgagctcgagcccgacgagcgcgccatgttcctcgaggagctcggcatcgaagagtccggcctcgaccggctcatccagtgttcgtacagcctgctggggctcatttcgttcctgacgtgcggcagcgatgagtgccgcgcctggacgatcacgcgcggcacgaaggcgccgcaggccgccggcaagatccactcggacttcgagcgcggcttcatccgcgctgagatcgtcgcgttcgacgacctgaaagcctgcggcagcatggccgtcgccaaggagaaaggcctcgtccgctccgagggcaaggactatgtcatgcacgacggcgacgtgacgctcttccgcttcaacgtctgatctttctggaaaacgacgaaccgcacgcggcaaaacgccgcgtgcggtcttttcttattccgttgtgtcgccgccgcgcaggcggccgaatttcccgcgcaggcgctcgccgaatttcggcggctgcgcggggcgctccagcaggaagatgccgcagtctgcacagtaccggcagtcggcaaagctgccttcccagatcccgtggctcaccacgagatcgccgtcctcgtccgcgcgaaaggatatggacttttcctcctgactccagatgatctgccgcgcgctctgcagatagccggagagcaattccctgccgcagtaggggcatttgtcgcctatggtcatggtggcgtgctcctttctgttatcggttggacttccagattcagtatagcacggactgtctgcatttggcaagcgctctgtgcagcgtttcatgcacaaacggcggcatttccggccggatttcgtatgaaattgtgcttgacaggggataacagtcggtgttacgatgataccgttcaaaaggcagtgacgggacttgcacccgagcgaggacggacagagaatggcggtcataggctgtgagccgcctgcggcacccctccggcgcagaccttccccgagccgatcgcccgaaccttgcagtaaggcgacccgtgcggcgcgcgttacagcgccaactgagggaaactcagggtggaaccgtgtgatttcagcacccctgtgccgcaaggcgcaggggtgtttttagtttaggaggagacattatggacgatcagtacacctttgaaaacaagacttacagagatacctaccgtcacaccaccagccacattctcgcccaggccatgaagcgcctgtaccccgaggtgaagctggccatcggcccggccatcgaggacggtttctattacgattttgacagcccccagccgttcacgcccgaggtgctcgaaaagctcgaggccgagatgcgcaagatctgcaaggaaaagctgcgtctcgagcgctttgagctcccgcgcgccgaagcgctgaagttcatggaggagcgcgatgagccgtacaaggtcgagctcatcaacgacctgccggaggatgccgtcatctccttctaccgtcagggcgaattcgtcgacctctgcgccggtccgcatctggactccaccggtcgcgtcaagggcaatgccatcaagctcacgagcgtcaccggcgcctactggcgcggcgacagcaaccgcaagatgctccagcgcatttacggcacctgcttcccgaagaaggaggagctcgatgcgtatctggcccgcatcgaagaggccaagaagcgcgaccaccgcaagctcggcaaggagctcggcctgttcacgttcatggacgagggcccgggcttcccgttcttcctgcccaacggcatggtgctcaaaaaccagctcatcgactactggcgcgagatccataagaaggccggctatgtcgagatctcgacgccgatcatgctcaaccaggatctctggcaccgcagcggccactgggatcactataaagataatatgtatacgaccgtcatcgacgatgtgccgttcgcgctcaagccgatgaactgccctggcggtatgctggtctataagtcccagccgcactcctaccgtgacctgccgctgcgtgtcggcgagctcggcatcgtgcaccgccatgagctgtccggcgccctgcacggcctgttccgcgtccgctgcttcacgcaggacgatgcgcacatcttcatgacgcccgatcaggtcaaggacgagatcaagggcgtggccaagctcatcgacgatgtgtactcgctcttcggcttcaagtaccacatggagctgtccaccatgccggaggatcacatcggcacggacgagcagtgggaggttgcgacaaacggcctcgtctccgcgctcaacgagcttggcaagccctatgtcatcaacgagggcgacggtgcgttctacggcccgaagatcgacttccatctggaagacagcctcggccgcacctggcagtgcggcacgatccagctggatatgcagatgcccgagcgctttgaccttgagtatgtcggcgctgatggcgagaagcaccgccccgtcatgatccaccgcgtgtgcttcggctccatcgagcgtttcatcggcatcctcaccgagcattacgccggcgcgttcccgctgtggctcgcgcccgtgcaggtcaaggtcatgcccatcaccgaccgcacgaacaactacgccaagcacgttgccgaccgtctggagaaggctggcctgcgcgtcgagaccgacctgcgcaacgagaagatcggctacaagatccgcgaggcgcagagccagaagatcccgtacatgctcgtcctcggcgataaggaagcggaaaacgacaccatctccgtgcgcaccctctccggcgagcagagcgttgagggcctctcggacttcatcgcgcgcctgcaggcggatgtcaagtcgcgcaaaagctgatatttcaaatttgaccgtataagaaaaaacgctccttcgcagactagaaccaaacgtctgcgaaggagttttgtatatgcagaaacgatccaaacgcttgtgtctcgcactcgcggtactgctctcggtgagcatggtgctcgttgcgcttgtcccggctgtcgaggcggcctcgtacaaaaaaggctccagtggcgccgtagtcacgcagatccagacgaagctcaaaagttggggctactataccggtaccgtggacggtatctacggcagcggcaccgagcgcgccgtgcgcgccttccagcagaaaaacggcctcacggtcgacggcaaggccggcgaccagacgctggcggccatgggactgtccgcgggcggaggcaattccagcaattccggcggttccggcggcgcgtccagttcgcaggtcgatctgcttgcgcgcctgatctcggcggaggcccgcggcgagccgtactccggccaggtggccgtcggcgccgtcgtgctcaaccgcatcaagcacccgtcgttcccgaatacgctccccggcgtcatctatcagagcggcgcgttcacgtgcatcacggatgggcagttcaatcagccggtcgcggagagcgcctaccgcgccgcgcgcgatgcactcaacggcgtcgatccctccggcggcgcgatctattatttcaatccgtccacggccaccagctcgtggatctggtcgcggccgctcatcacggtcatcgggaagcaccggttctgctcctgagtgtccggaaacagcgcaaaataggggatgcggcagcgcgtccccactacatatagcggggcaaaaaaataacgttaaaaagtttaaaaagagtattgacaaatggcaacaggaagtgctatattatcaaacacgcgaggggttgtgcgtcacgaacgaacgaaacttccgaaagaaagttgaaaaaagttcttgacaagcgaagccgcgtgtggtagtataaacaagctgtcgccgagaggcgcagcggcgtgtaccttgtaaattaaacaatgtaagaacacaaaactgaaaaagttttgtagcttatgcaaaataagcaccagaaaagggttcttaacatcggagac

SEQ ID NO: 13959 - DNA, 34416 bp, Unknown
  gut microbiota DNA sequence
atcgcgtgccgagcgtgatgtgcaggcaaagtttctgcttcgcaacggtgcagaccatgtagtctacccggaaaaacaggtggcaaaatgggcagcgatccgatacactgccgaccatatcttcgactacatagagttcgacgagcagcacgccatttttgaggtggaagtaccagaaggctgggtcgggaaaagcattggcgaactgaatatccgcagcaagtttggaatcaacattcttggcatcaagcattcgggaaaaaccgacgtatcaattacaccggatacggtgctgtccggggaaatgacgattttagcgttgggcgaatacaaagcgctgcaaaagtgtttccgaatctgaacggacggtgagggtatgtggaagatgtcgttttgatcgctgggacagcgttaatgttcctgctcagctggtttttgatgaagcggctggatcgctttctggatgaaaatcagaagcgaatcgaggaagcgcccgaacaacagcagcctgagccgtgcgtgcatctggtcggaaatatttctcctgacgaacttgaggaaacgctttcccggtttcgcagcagtcatgcccatgtagaaatcgtgatctatgattcagagcaaattttatttccaaacaacgaatccggttgggcgcagtagaaaccatcacattttggtgctataatatcatttaagaggggtggtgaaaatgtgcagaacaaaggaagcaaactgccaaaagagcatattcttgtgtgcctgtcctcgtctccatccaatgaacgcattgtacgaatggcagggaaaatggcacaggcatttagtggcagccttaccgcgctttacgtgcagacacccgaagacgctgatatgaatgcggaagataccgttcgcttgcaggtgaatatgcgtctggctcagcagcttggcgcagagatcgtcacaacgcatggtgaagatgtggcaacacagatcgcggaatatgtgcgtctctctgatgtgaccaaaattgtgattgggcgaagtggcgtacagcggcggcatttttggagtgaaccgacgctgacagaacggctcattacgcttgcaccagaggtggacattcatatcattccggatgtggaagcctataagagctaccgcaggaaacggctgcttcccatccgtccggcgtttccgaccgcatgggaactgcttctgaccatcgggattctggcagctgcgacggtcatcggatgggtctttctgcggctcggctttgcaaatgccaatatcattatggtttacctgctgggggtgcttctgacttccgcttttaccagcggatatacctgcggtgtgctgtccgcttttttgagtgtcatcctgttcaattattttctaacggaaccccggctgtctttggcagcctatggcagcaaatacccaataacctttgccgtcatgtttgcagcggcgcttttgaccggtacgcttgccgcaaagctcaaagcccatgcgcagctatccgcgcgggatgcctatcggacaaaactcctttttgatatgaacaggcagcttcaaaaggcggaaacaccggatgaggtctatcagatgaccgcgacgcagatacagaagctcatgcagcgggacgttttgatttatccggcacaaggcgatgcgctgctggatgggaatgtttatccggcagacggaagcagcccatattgcatcccggatactgatcaggaacagaacgtgattcaatgggtctggcaaaaccgaaagcgtgctggcgcaacgacgcaaaactttccaaaggcaaaacggctgtatcttgccattcgtaccgggcagcgggttttcggcgttgtcgggattccgatggagaagcaaacgcagcctgacgcatttacatccagcgtgctgttttccattctcggcgagtgcgctctggcgctggaaagcctacgcaacgccgaagaaaaggaaaaagccgccgtccttgcaaagaacgaacagcttcgtgcaaaccttctgcgttcaatttcccatgaccttaggaccccgctgacctccatttccggcaacgcggatacgctgctgcacagctataacgtgctggatgaacaaacgcggaaacagatttttacggacatttatgacgatgcgcaatggctgacgggactggttgagaacttgctttccattacaaaaattgcggacggcagcgtaaaactgcacctttctgatcaggtcgtggacgatatcgtatcggaatcgctccgacatattgaccgaaggtcggtggagcatcacattacagtagattgcggagatgagccgctgctggtgcgggtagatgcaggactcatcatgcaggtgcttatcaacttggtgaacaatgcagtcaaatatactccggctggctcgaacatccggatcacggcaatcccgcgagacaatatggctgaaatatgcgtcagcgataacggtcccggtattccagatgaactgaaggaacgtgtttttgaaatgttttttaccgggggcaatccgattggcgacagccgccgaagtcttgggcttgggcttacgctctgccaagccatcattcatgcccataatggcgaaatgacattgaaagaaaattcgccgcatggctgcatcttttcctttacagtaccgctcagtgaggtgaacttaaatgaataagccgcttgtcctcgttgtagaagatgatacgccggtgcgcaatctgatcacaacaacgctgaaaacccatgaatacaggtatctttctgcgcaaaacggcgcaagcgccgtgatggaggcgctgtctcacaacccggacattgtgctgcttgatttgggactgccagatatggacggcgtggagatcatccgaaaaattcgttcgtggtcaaatatgccgatcattgtgatcagcgccagaacagaggattctgataaaatcgtggcgctggatgccggggcggacgattatctcaccaagcccttttccgtggatgaactgctggcgcggctgcgagtgacgcagcggagactgtcgctgatgaaaacagacgcagcgcaggaatctccgatttttacgaacggtgcgctgaaaatcgactatgcggcaggttgcgcatatcttgacggtgcagaactgcacttgacgcccatcgaatacaagctgttgtgtctgctctcaaaaaatgtgggcaaggttctgacccacacctacatcacacagcagatttggggcagcagttgggaaaacgatattgcttctctgcgggtgttcatggcgaccctgcgcaaaaagctggaacgcggaaaagacgggccgcaatacatacaaacgcacatcggaatcggctatcggatgctccgcgtcgaatagcagggaggctttcaaaaaatctatgaatcatcatgctgttgaaaaaccctccgttaccgcgcagtatggtgtcaagcctgctgcctctgctgcagcgaaaatggcagccaagcaagaggagtttgtcgcacccgatgttaaggatggctccattgttctgcacaaagcattcggagaaggtgcggtcaccaagattgacaaagcgcagaaacacatccgtgtcacctttggtattggcgaaaagacattcatcttcccggatgctttcaagcagggattcctgaaaatgaagggagagtaatccatgccggaaatattcagtaatacaacgctgacggtcaatcagcttatagaaaagatcgacacaggcgaactcggactgccggaattacagcgccccttcatctggaaagattcaaaggtgcgtgacttattcgattccatgatgagaggctaccccattggctaccttatgctgtgggagtgtccgtctcttgataagaaaaaatccatcggtgtcgatgcccacagctacgactcacccaaggaagtcatcattgacggtcagcagcgtttgacttcgctctatgccgttatgaagggcaagaaggttatcaactcaaagttcgatgagagatgagaagagtattgttatctcctattgcccgctgcaaaacaaatttgaggttggttaccaagccacgaagaacgccccagaatggatttataatattagtgacctgttcacttccacgaacacctttaagttcatcggtgatttcatcaagaaactgggtgactatagatccaccaaagggtccgagcttacagatgaagaacagggcttaattgcggatcgcatcaacagtgtggtcaatctgaaaagccatacgcttcctgtgttcgacataaagtccaccgcagaggaagaggatgtctctgaaatattcgtccgtgtaaactctggtggtgtttctctgaaacagaacgacttcatcctcatcttgttgtccttgtattgggatgatggacgtcgtgagattgagcaattcagcaaggattccaccgctccggcaaaaggtaaaacgacctcttacaatcagctgaccaccgtgtcagcgcaggatgtcatccgcgttgttatggcatatgcatttgacagagcccgtttgaagtatggctataaactgctcagaggtgccgactttgataaaaagggtgccgtggatgataatcttcgtgttcagcgtttcaatactctcaaggagaaactaccggatgtcctcgatgtacacagctggcatgagtttatcaaagccatcatgaacgcaggatatttgtccggggatttgattctgtctggcaacgcaatattctacacctatgccttgtatttgattgcgaagcaccgcttcaatgcatcgtataatgagaatatgcaccttacctcgctgtggttcttctatgcttcgctcatttcgctgtacacgggctcctttgagtctacggtggaaaaccatctgaataccatcaaaagcctcaaaactctggatgagtacaaggagttcatcctgtccagagtaaacgagcgtttgacgaatgactactttgacatcaccctggttggttcggagggcttggctgtttcgggacgaggtaataatgcatggaatgcctatgtggcatcgctgaacattatgaacgcaaaaatcctcttctccaagagcaatctgcttgtgtcaaagctgttcgagcccggaacagacggtaaccgcaagtctctggaaaagcatcatcttttcccaaaggcttacttgaagtcccaaggatactctgatgcgaagattaaccagatggcaaactacgcattcattgactggaaggacaacatggacatcctggatgatgctccgtctgtgtattatccgattgtctgcgccggattgtctgacgagcagatccgtgttatggaagaggagaacgctctgcctcacggttgggaaaatatggcctacgaggacttcctgattgagcgcaggaaattgatggcggcaaaaatcaaggcagcctttgagattctgaaaaaggcagcgacttgagcgagaccacattataaattcccacaccttttatcaatagggaatgctgtaaatcaacgattatctctgtaattcaacgaataccccactaaaacaacgattgcccttgtaattcaacgatttacgctctttcaacgattacgaggaccacgaagcccacgcaaaggcaaaaacccgaccatgaaaacaacctggccgggttttcttttggggccgctgggtgcaaaagtgccgcaaacacgccgtttttgccaaaaagtaagaaccgtaaccccgatacgctttgtatcaaaattacggttcttatttggcggagaaggagggattcgaaccctcgatacccttgtggggtatacacgatttccaatcgtgcgcgctcgaccaggctacgcgacttctccacgttctgttcgggttgcttacattttaagttgtcagcttgcatattataatcaagatttgtcataaagtcaagtaccattttgaaagaaacgcattttttgtgcggatttgtctcagcccagcagacaggcgagcaggtttcgcacggcttgggcgtggcagcggtcctgctgcgccatggcgctcagtgtttcgcgcagcggggacggcgcggtgttcgccgccgcgtcgagccgctccgccagcttaagctcctgcgtatagacgcagcgcagatcctgcgcggccgtgcccagacgcggacaggcggcgggcgggacgcagcgctcgcccgttcgcaggaagtactccacctgcagttctttttggtgtgcccgctcctgcgccgcgatgccgagcagctgctgccgcccggtgcggatgcgctgcgagagcgctgtgtaaaacgcagccccggccgccttggcgcggatgcactcggcgagcagatcggtcagcgtgtcggcttccggcggcgtggtcacgggcgcgtccatgctgcccgctacacgctgccagacgcgctgaaatgtgcggttgtcaagaaaaacggaatcctgcatcgtccatacccccacatcatgctatggcccggcttgcaaaaacgtgcaaagtgtgccataatcacggcagagatcaggcatcggaggcgaccattatggctcgatttttcatagcaggtacgaatttcccgaatggccgggcgatcatccgcggccgcgacgccgaccatatccgcgtgctgcgtctgcgcgcgggcgacgacattgtcatctgcgacggcgcggggcgcgactataagtgccgcctggtacagacgctggagcacgaggccgaggccgaggtcatcgaggtcgtgccgtgcaaggcagagcccactgtgcgctcgacggtgtttgccggcctgccgaagggggagcgcagcgactttctcgtgcagaagtgcacggaggcgggcgcgtccgagatcgtgtttttctcctgcacgcgctgcgtggccaaggccgtcaatatggaaaagaagctcgagcgctggcagcgcatcgctgaggaggcggccaagcagtccggccgcggcatcatcccgcaggtgcgctatgaggcggacttcgtcgctgtgctcaacgacgcgctgcacaccgatctgccgctgttcatgtacgagaccggcgagcgcgagacgatccgcgacgcgatcgagcacacggcgtccccgatcgcatcggcggccatcatcacggggccggagggcggctttgccgagttcgaggccgacatggcccgcaagctcggtatgcacatctgctccatgggcgagcgcatcctgcggtgcgagacggctccggtcgtcgcgctcacggcgctgatgtacggcaccggcaatttgtaaactttttttgaagttggggcttgacaagccctgcgtgtgtatgtaataatactcgacgcaatcaaataaatatccgtcgaaacctcaaggatcggctcggctgagactggaggcggaggaactctggagaatcccgcgccaagcgggtgccgaaggtgcaaggcgaaagccgaatctctcaggcaaaaggacagagcgagtgcccgatgtgtgcgggcgttcaagcgctgtttgttctctggagctgctggtcaaaacgaccggcagctttttgctttgcaaaaattcaatgcagagggagaaacaacatggataccttactcaaaatcgtgcagaccatcaacatgtacctgtcagactatgtgctgatcatcctgctcctcggcgcgggtctgtatttcaccatccgcacgcggttcgtgcaggtgcgctgcttcggcgagggctggcggcgcttcttcggcgagttcagtctcaacggcgagaagcacaaatccggcatgagctcgttccaggcactggcgacggccgtcgcggcgcaggtcggcaccggcaacatcgtcggcgcctgcggcgcgatcctcatcggcggccccggcgcgatcttctggatgtggatcatcgcgtttttcggcatggcgacgatctatgccgaggcggtgctcgcgcaggagacccgcgtggtcgagccggacggcacggtcctcggcggcccggtgtactacatcaagcgcgcattcccgaacggcttcggcaagttcctggctggtttcttcgcggtcgcgatcattctggcgctcggcttcatgggctccatggtgcagtccaactccattggtgaggcgtgccagaacgcattccatattccgagctgggtcatgggcctgatcgtttccgccatcgcggcgtttatcttcatcggcggcgtgcagcgcatcgcctccgtcacggagaagatcgtgccggtcatggcctgcctgtatctggtcggcggcctgatcgtgctctttgcccgcatccgctacgtgccggagaccttcggcatgatcttcaagtacgccttcgtgccgcagtccatcatcggcggcggcatcggctacgcactcaagacggccatcagccagggcgccaagcgcggcctgttctcgaacgaggccggtatgggctccacgccgcacgcgcatgcgctggccaacgtcaagagcccgcacgagcagggcacggtcgcaatgatcggcgtgttcatcgacacgttcgtcgtcctgaccatgacggcgctcgtcgtcatttccacgctctacgccggcaacggcccgctggcccacggcgcggtcgacggcatctccaagacgaacatggcgcagctcgcgttctcgagcgtgttcggtgatacgctcggcaatgcgttcgtggctatctgcctgctgtttttcgcgttctcgacgatcgtcggctggaacctcttcggccgcatcaatgtcaattatctcttcggcaagaaggcaaaccttgcctactccatcatcgccatcatcttcatcttcctcggctcctgcctgtccaatgatctggtctgggagctgacggatatgttcaaccagctcatggtgctgccgaacatgattgcgctcgttgcgctctccggcatcgttgctgtggccgcacgcaagcgcagcgacgagcacgaactgcgcaagtaacatcccaacagaaaaaccgccctgcaccgatcggtgcagggcggtttttgcatgttcgcttatttgcagcggcgcagcacctcgagcgtgtagcgccagacgcgctgcacggaggcaatgtgcatccgctcgcggcaggtgtggatctccgtcagatccgggccgaaggacacgcagtcgagccctggcagcttcccggcaaacagtccgcactcgacgccggcatggatggcttccaccttcgggtcgcggccgtactgttcgcggaagaccgcgaccatgcgctcgcgcagaggcgagtccttgcggtattcccacgcggggtagtcgcccgagacggccactgtgccgccgagctgcgccatcaggcagcgcaggcgtgcgacgagcatctccttttgcgtggacacgctgctgcgcacgcagaacgacgcctgcacggtgtccgcatccgtcgtcaggatgccgaggttcagcgacgtctgcacgagacccggaatgtcccggctcatggcctgaatgccgtttggcaggcagcagagcatgcacacggcgcgctgcgtggacgcctcgtccatcggcggctgctgcgcctgggctgcgtcaacgcgcacggacacatccgggtcggcggccgcgtattcgtgccggagcgcggcgtccatgtccgcgatcgccgcctgcgcggcggctgcatcggccacggcgatgacggcccggctctcgcgcggaatggcgttatccttcaggccgccggcgacggagacgagccgcagcggcgtgcgcgcgccgacggcgtacagcacgcggcccatgaggaggtttgcgttgccgcggcccttgtcgatctctgcgcccgagtggccgccgagcagaccgccgaccgtcacggtcagcgctgtgccggaaaacggcgcgcgcgtgaccggcagcgtgcacacggacacgttgccgccggcgcagctgacggtgagcacgccctcgtcctcggagtcgaggttgagcatcgtgcgccccttcagcacggaggcgtccagtgcggctgcgccgagcatgccggtctcctcatcgacggtgatgacgacctcgagcggggggtgggggatgtcgtccgcagccaggatcgccagcgccatggccacggcgatgccgtcgtccccgccgagcgttgtgccgcgtgcgccgatcgtatcgccgtccacgaagaggtcgagcccctcgcgggccatgtccttcgtgcagtccggcgcagtctcgcagaccatgtccatgtgcccctgcaggatgaccggggcggcggattcataccccggcgtgccaggcgcgaagatgatgacattgttgtgcgcgtcctgaatgcagcgcagctgatgttcggctgcgaagcgaacaaggtaatcgctgatggctttcgtgttgccggagccgtgtgggatggcgcacagctgctcaaaacaggaaaagacagcgcgcggctccagatgatcgagaatcggcatgacaaatctcctttgctggtgaaatggacccggcggacacgctgctgtgcccgccggggatggttacgattcggccgggatctgcacccgggacagggaggcgcggatgttgccggtgaacagcagactcaggcggcggatctgcgcctcgagatcctctttcatcccgttttcgagccattcgtagaaaatgtccgtgatgccgaagcggtagaggtcgcacacgagctttttgtccgcctcgctcacgcgcaagccgtgggcctgtgcctccacatagctgcgcatcatttccccggaaatgcggtccacatgcttttccagctccagacggtgcgaggaggtgtagatgtggtacacggcgcgcttgtgctcgcgcgcgaagcgggaggcggtgatcatacattcctcccaactgccggtggcctcaaattcatcgagcgcgcgctcggtctcgcggtggaggatggtatcgagcagctcgtacagatcggagtaatggtagtaaaacgtccggcgcgtgatctggcattcttccacgagctgcgttacggtgatcttgtcaaacggctgctcggacagcagcttcaggaacgcatcctggatggcggcttcagtcaaatgtgccaagcgggatcccacctttctggtcgtgcggcgcggtcattgcgcggccggttgtgtgtcctgtgcggggagatattcgatgtgcgcatagctgtgccgccgggcgacggtatcgcacatgaatgtatagactttttgatgcagggcccggcgggcgctgcgcggcggcagggatgcgtccgggtagaccggctcgccgacaacgacggtgatgcacggcggcagaaaccgcagcagcttccgctgccggtagacgaccaccacgccgacggcgggcacctgctcgcgcaccggataggtaaacgctgtgtccgggaacgggcggataccattataatatggccagatgtgcgcctccgggtagatcatgacggcctggcggcgctcgagccgccggtggatcgcggccagaaactgccgcgtgccgtcgatcgtgtcggccagcgggacggccccgagcatctgcacgatgttgcgcacgcccggaatggagactgtgtccgccgcagtgacgatgtttgcgcggcgcgggaacgccagcagcgtcgggatgaaggcatccgccagcgtgttcgtgtggttgccgtagagaaaatagccgccgggcagctcgcgcagcactttgcggttttcgatccgcaggccgaaaacgagcttgcagtacaaaaacagaaacggcgtcatgatcagccggtagacgacgaatgcgagcgcctgccagaccgggctggggtgctcataaggaaagtcggcgccgatcggcttcggccggatgtgcccgttcgtcggcgcgaagtcgtcgtgcagcgggtcgtgataatagatggtcttgcggctcatgtcggctcaccgcgcagggcgacggcgtcaaagagcatctgctccatctggcgcatgcagctctgctgttcaaactgcgtgccgctctcgagatatttccggctgtagtccgtgcgctcggccgggtgctcgacccagtagtcgatcttggcggccatatcctcggggtccttatttttaaatagagatttctcgtcgagcgcgaatgccttggccgcactcttcggggagttggcgatgaccggcaccagcccgcaggcgatggcctccagacaggcgatggactcgatctccacctcggcggggtgacagtagaggtcggcgcagcgcagcagattcagcaggtcctgccgtgagaaaaacgcgatctccatgtcgacgccgtatttttcggccagatgacggtaatgctcttcacgcggcccttcaccggcgaggatcaggtggatctgctcgcggtgggccgagcggccgatggccttgatgaggatctcctgattcttttcgctcgacaggcggccggtcgagacgatgaggaacttgccttccagtcccgccgggcgcttggccgggccgggcgtgaacatgctgttgacgccgttggagatcacgcggccgttcgtcgggccgacgacggcctcaaacgtgtcgcggatgaactgcgtcgggtaatggatgatgtccgaatactgatacaccatctggtagcaggcgcggtagacgccgcggttgatcgcatcgagatccttgcacagaaagtgcgccgtgacgttctcggcctggcagtggaagctggaggtgatgggcttgttatacgccttggcgattttcaccgccgtgtgcgacagctgcagcacgaacgtcgtgtgcacgacgtcgcagtcgcggatcgcgtcctcgagcagggagcggtccaggcgcggcagcgtcacgccgttgcgctccacgatcgggttgagcaggtagaggttcagctccggtacgacgtaaaagcactcgttgccggccttgtcctgatcggcacagaccacgcgcaccgtgtgcccctgcgcgcgcaggaagcggatgaggttcatgcaggcaatcgtggtgccattgttttcttcgcccagaatatcacagacaatcgtgatcgtcatgttgtcgtatcattccttgttttttgaattggcaggagcgtcccgccgcatgatgcgacattgctcattgtaaccggaagaaatgagagccgcatgaaaaatagaggataaagatccattcatttaagaattcaaacaaatctcacaatatcatatcatactttctcacgtgagaaaacctctcattttcctgaaaatgtgacggattttttgcaaggatcgcaaaacggacgcgcgccctcttgaattacgttttcgaatcgtgtatattatttatacccatgtgttcatattttttgttttaggagagcaaattatgacagactatcagaagatgtatcaggaaaagctgacgacgccggataagattgcccagcaggtgcagtccggctggctgctcggcatggatacggcgacctcgcagacaccggccatcatgaccgcaatcgcggagcgcatccgcaacagcgatattacgggcgtgaaggtgcaggccctgctcgatgcgtacccgttcgagttttataccgaccccacgctggccggcaagatgaccggctacagctggttttccagcagcgcggcgcgcaaggcggtcaacgccggctatgccgatatcatcccggcatattaccgcgatttcccgacccgcatccgcacggagtacgactatgacgccgtgtgcgtcgaggtcgcgccgatggaccgccacggctacttcagcctggcgctcaacggttcgtatatcgacgccatgctcgacaagaccaagcggatcttcctcgaggtcaacgaccgccagccacgcggcctgtgcggctcgctgatccacatttcgcaggtcgacgccatcgtggagtataaccacgatctgccggtcctgcccccggtccagctcgacgaggtgagcaagacgatcggcggcctcatcgccgagcgcattccggacggcgcgtgcctgcagctcggcatcggcgcgatcccggacgcgaccggcatggcgctcaaggccaagcacgacctcggcatccacaccgagatgttcaccgactccatggtcgagctcatcgagtgcggcgcggtcaacaacagcaaaaagcagatccaccgcggcaagaccgtcacgacgtttgccttcggttcgcagcgcatttatgactatatcgacgataacccggccgtcgagatcctgccggtcgaatacgtcaacgatccggacgtcatctgccagaacgacaacatgatctccatcaacgcagcggtcgaggttgacctcttcggccaggtctgcgccgagtcggtcggcacgaagcacatgtccggctccggcggccagatcgactatgtccgcggcgcctgccagtcccgcggcggcaagagcttcatcgccttcacgtccacggccaagggcggcacgatcagcaagatcaagtccatcctcaccccgggcgccgtcgttacgacgagcaagaacgatgtcgactacatcgtcaccgagtacggcgtggcgcatctgcgcggccgcagccttggcgagcgtgcccgccagctgatcgccatcgcgcaccccgatttccgcgacgagctgaccttcgaggccaaaaagcgcggcattatgatctgatcccgcagtgcaaagcctgctgtccgcatcccacggacggcaggctttttttgtccatacgcattctgtatcggggcgcacataatggtgacgtgtgtttcgtcaagcgctggaaaatgcgcaaaagtgttacatttgtaccgcagtggggattgtgcttttctcgcagcggcaatatagtgtaaccataaaaagggggacagatttcgatgctgtcccaaatctattggagggatttttcatgaagaaaacgtggagcagagtgctcgccaccgttctggttctggcgatggtgctttgcatgcccggtttcgcagcaagcgttgccgatacgacggacttcgagtccgatcgtgcgacctctgctgacgaactgacggacgcggatctgccggagctcctgtcggcgagcggcaaccactatccgatcgtgctggtgcacggcctgttcggttggggcggcacggaagtgctcggcctgaactactggggcggcttcagcagcctgcgcgacattctcaacaatgccggctacaaggtctacaccccgtccatcggccccgtcgccagcaactgggaccgcgcctgtgagctgtatgcctacctcgtcggcggcacggtcgactacggcgcataccactccgccaccaacggccatgcgcgctatggccgcacgttcccgggcgttctgccggagctgaataaccccgacagtgagctgaaagtgcatctggtcggccacagcatgggcggcgagacgatccgtatgctcgcacagctgctggaaaacggcgatgccgatgagcgcaatgccagccgcggcggtgatatcagcccgctgttcaccggcgagtgccgccactggatcgagagcatcacgacgctctgcacgccgcacgacggcagccagtatgacacgaaggtctatcagaacatcggcgatctggcccagtatgccatgggcatcatcggcgcggttaccggcaccaatgtcaatgagaacaacttcggcctggacttcaagctcgatcagtggggtctggtgcgccagcccaacgagtcttactccagctacttcaaccgtgtgatcaacagcaagatctggacgcagcacaccaacgacctgagcgtctatgaccttgacgtcgacggcgcagccgtgctcaacggctatgccaaggcgcaggatgatatctattacttctccgtcgcctgctcgaacacccatcgtgaaccgctgaccggccactatctgccgaatgccagcatgaacccgatgatggtcaagagcagcacctacatgggcagacacgtcaactacgcggtcggccatgtgaacatcacgccggactggtgggagaatgacggcatcgtctccgtccgctccgcgatccgtccgcacgagaattccacggataagtacaatgaaaactacggcgtcggcgctgacggcaagatgaccttcaaggccggcaccaagatgggcgtctggaactacatcgagaagatcgacaacaccgaccacatcaacatggtcggccagatgcagaagtccacgcacgccatgctgcaggaaaagttcttcgagctggccaagatgctcaacagcatcccggtgagcagctcgaccggtgcacatgtctgcccgggcgctcacttcaccgatatgcccgcctacaccaactgggcgcataagggtctggattactgcatccagaacggcatcctgaacggcacgagcgcgacgaccattgcgccgaacggcacgaccacgcgcgcacagctcgtgacgatgctctaccgtcaggccggttctccgaaggctgccaagtccagccccttcaccgatgtgaccgacagctggtctgtcgatgcggtcaactgggccttcgagaagggtgtcgtgaacggcacgagccccaccacgttttccccgaatgatgccattacgcgccaggatatggcgaccatcctctataactacaccaagaatgttctggatctggacgtgtacgataccgctgacctgaccggttatccggactacagctccatttccgattatgcccgcacgccgctgtcctgggcggtcgcacagggcgtgatcctcggcgtcggcaattccaacggcgtggacacccttcagccgaagggtgatgccacccgtgcgcagaccgctacgatcatcatgcgcttctgccagaacgtcctctgagacttcacttcaacaacacaagcccgatgggatcttcccatcgggcttgtcctgttttcgcttttcctaaaaatcagcgcgccttttcccagccgtcgagcggtgcgcgctggatggcgccgaacaccttgctgcgcagatcggggtaggtctggctcatggtgcggatgaactgcttgatctcgtagcgcttgctgccgcggtcctcggggcaggggttttcgacgatcggcagcgccagcgccttcgccagattggcgatgcgcccctcgccggcgtagagcatcggacggatctgatccacgcccgtgcgcgtcatgtgtgtcaccggctgaaagcagctgatgcgcccctcgtacacgagcgagagcaggaacgtctcgaccgcgtcgtcaaagtgatggccgagcgcgagctttgtgatgccacgcgcgctgagcgcggtacacagcgcgccgcggcgcatcttggcgcacagggagcagggattgtcctccttgcgcacgtcgaacacgacctctttgatgtccgttttcaggcgggtgtacggcacgccaagcgtttcgcacagctctgccaccggcgtgaaatccatgccgtcgaacccgagctcgaccgtgatggcctcgagcgcaaacggcttcggatagtaccggcgcagctcgttgagcgccatgagcagcacgagcgaatccttgccgcccgagacgccgacggcgacggtgtcgcccggcgcgatcatgtcataatcctccacgcaccggcgcaccagaccggtgaacgcgttcaggtcattcatagcgggacctccaaaatgaaaatagaaactgtgaattcgagcgtaaaacggagaaaaacggagattttgagagaaaagtaatatctaaatcaaaattccgttgacaggtaccaccgattgtggtataaaagataagcgcgaatgtgagacctattctacgttcgcgcctgaaaaatgtcaaaatgtttttcaacacattcaaattggaggcacgaatatgtccactactttgctgaacaaggacaccgtcacccgcaagtggtacgttctggatgcagccggcaagccgatgggcaagaccgcagcgctcgctgccgatctgctgcgcggcaagctcaagaccgactacaccccgcacgttgactgcggcgactttgtcatcatcatcaacgccgagcaggcagtgctcaccggcaagaagctcgagcagaagtactaccgcacgcactccggttatcccggcggcctgcacgagacgcagtacaagaagctcatgaaggacaagcccgagctggctatgcgtctggctgtgcgcggcatgctgcagaagaacaccatcgcccagtggcagctcaagcgcctgaagatctatcgcggcgccgagcatccccatgcggcacagaagcccgaagtctgggatcgctgagaaggaggaaatagaacatggcaacttatacgagcaagaaagcctatatgtatggcaccggccgcagaaagtcctccgtcgcgcgtgtgcacctgttcccgaacggcaccggcagcatcaccatcaacggccgtccgctggatgagtacttcggtctcgagaccctgaagctcatcgtgcgtcagcccttcgcggcgaccgacaccatgggcaagttcgacgtcgaagccaccgtgaccggcggcggtgtgaccggccaggccggcgcgatccgccacggcatcgcccgtgcgctgctgcaggtcgaggacagctaccgtgcgcccctgaaggctgccggcctgctgacccgtgacccgagaatgaaagagcgtaagaagtacggcctcaaagccgctcgtcgcgctccgcagttcagcaagcgctgatctatccgaatatcgtttccaaagcccgagatccgctggatcccgggcttttctttgtccgcgcgggagcgggcgatcggatttttgcgcgcactggcttgacaaaccggggccgatgtggcacattatgcatgattagttgtatctaactgcgttttgggggcacaaaacgccctgttccggggcaaatctgaaaaggagtcaagccttttatgccggaatcactgatattctgaaacttcgcgtcctactcagcttcctcaatgaagatcccaaaacctgcacggtcacgggccttgccggtgtgctcggcgaggggaagcagaaggtcagccgcatcttcatggcgctcgagcgcgagggcctgctcgaccggagcgacccgcgccgcccctgcctgacggaggccgggcgggcgcgcgcggcctgttatgaggcgcgcacgaacgtcgtgctcaaccacctgctctatgagggcctggacatcgacagcgccatgcacgacgcctatgcctgggcgctcatccgtagcgagcacgccttccggctctacacgccggcggaggagttggcgatcagcgagaccatctgccgccccatgctcgtgggcagcgtgctcagttgggtcgtatttgcggcgcttgtggcgctagcagtcagagtcagcgcgtggttttgcattccggccgttttggtctgcatttatgcggcgatgtgcacctgccttggcatctcctataccgtgctgatccggacgctgcgcggggaatgtgaagatcctgtacgctgagatgacccggcgggccgcccgacggcctcatgacagagtacgcaaggaaaggaggagcgcgcgtgatcgagatcgtgtatcatggcgaggcggccgccgctttcggcccggacgggcaggccggcggctttgaaaacgcggacggaaacggagagatccacctctatccgctgctggacggtgtgagcgccatgtgcctgcggctggagatgggctcctatacggagatccgcacgcagatcgggatgctggagatcaatttctgcgccaacgggcgctttgagacccggttttctctgcgggatcatgttctgctcaagccgggagatatggccatcagctgttacgacggcgtgcacggcacgatgtcggagtcgcactttccgctgggctattacgaaggcatctgcctggaggtagctccggatgccgcccggcgctggatcgcgcggaacgcgccggcgctttccgtggacttttccgcgctcaatcgcaacctcctgggcagtaagtggtatacatacggcccggccgggccgcgctgtgagcacgtgtttcgggaattgtatgaaagcattgcctatctggatcccggcttcctgcagctcaaggtgctggagctgctgatgctgctcggccgtgttccccgcgaatccgcagccgacccgtactgctcagtcaggcaggcagagctggcccggcatctccgggatcatctgctgaccgaccgggaggggtatgtctcgctgtcgcagctggcggcggagcacgagatctcggtgtcccacctgcaaaaaattttcaagcgggtctatggcgttccggtgtatcactatatcaaggagtaccggctggaacaggccgcagtggagctggtgcgcagcgcaaagccggtgacacagatcgcgcaggctgcggggtatgacaatgccagtaagttttccgcgtgcttcaaggcacgctatggcgcgacgccgtcgcagtaccgcgcccatgcaaagcatgcgtcaaaacggagcagtgaaaccaaaacggagtagcccggggcggcacaatatggtagacttcctgctggttagacgagactaactaataacaggaggtatacaatgaaacagagaattgctgcatttttgatgtgcgtgatctgcctgctgtcggtcgtcggctgcggacagaccaaagcggacacgaacaccccctcggcggccaatcagcagacggtcacggatgactacctgacgaccatcagcgggacgtatgtggagctgttcccggagctgtcgaaggcggattaccggagcatctggcatgatgccaccgcgccgctggtgggcgaggacaatgcggacgccgccacggacaagctgctcgggatgtgcacggcaaagatctacggcgcagacgctgccgaaaaatatgcggccgatccggacagcatggccttcgactgctatttcctgggcggggtttcgaagttcgtgatggacggccacaagatcaccggtctggacgcgcagggcaaggaagttttctcccacacttatcgaaagctggacaaggaaaatgaaaacggcttcattttctatcagagcgaggacgaaaactccggtgaattcacctactttgccttctctccggacacgatggcgaccacctatcacctggagttccgctatgcggaggatctcgatgacctgcagagctggttcgagggcgattatgcttactggaacgcatctgcgatcgccgaggattacgatcaggagacgctgaagaacgtgatcacgctctttgcgacggaaaacctgccggaatcgaagtaagagataccgaaagcaaaaccacatccgccggtccattcggaccggcggatgtggtttttgttgtttatccgagcgccacgtccagcatcatcatgatgctgaagcccacggcgaaaaacaccgtgccgatattggagtgatcgccctgcgacatctccgggatcagctcttccaccacgacatagagcatggctccggcagcaaaactgagcagatacggcagcgcagggacaacgagctgtgccgccagaatcgtcagcacggcgccgatgggctctaccacgccggaaagcacgccgccgcagaaggctctgccttttttcatgccctccgcccgcagcggcatggagatgatcgccccttccgggaagttctgaatggcgatgcccagcgacagggccagcgcaccggccgccgtgatctgcgcgctgccggagcggtacccggcgtataccacgccgacggccatgccctccgggatgttgtgcagcgtcacggccagcaccatcatcgtcgtgcgctgcaggcggctcttcggcccttcggcctgggcgctgttcgcgtgcaggtgcgggatgatgtgatccagcgcgagcagaaacaggatgccgagccagaagcccagaaaggcggggaggaacgagagcttccccatacctgccgactgctcgatcgccgggatcagcaagctccagaccgaagccgccaccatcacaccggcggcgaaaccggtcagcgagcgctgcacggcgtcactgagcgctttcttcataaagaacacgcacgccgcgcccagcgcggtgccgagaaacgggatcaggatcccccaaaatgtttgcataagacagcttcctttttgctatggattaggttgttttcgtaagttagatagctctaactaataagcatcataccagagatcatcaacatttgcaagcggaaacccgcggcccgtgaaaatccatgatttccaaccggtttcgggcgctccgcagctcaaaaatggggcggccgtgcggccgccccggtgcgttcattctttttccggcacgtctgcgtcggcttccggcgcagcgttttccgccgtgccgggccggttgcggcgcggccgtatcttgccgaggagacggttgatgtgcttttcaatgtcctgcgacagctcggcggccttggccgcgacttcttcggcggctttgggcgcggcggcctgcgtgtcatcggcggcctccggctccgtttccgccggggtgtcagatccctgcgcgggcagaatggcctccggcggttccggctggctgaggatcgcctgtagcagctccatgtccgtcatgatgcgctcggacgcgatgccaagctcctttgcgtcgtgctcgagcacggcgatgagcaggtcgtagtaatcaccatcgcatttgagcgccttggcgatctgcggcagcgtcttttcgtggaacgtgcgcagcgagccatcatccgtcccgaggtattcgagcagctgctggcgcgccgcgtcctcggacatggtgcggtcgatataatacgtgctgccgtagagaccgtagagcacgcgctgggcgtcaaagtagccgaggcgcatgttcttgcggctctgctcggcgtcgaagttcagaatgttgccgagatcgaccgtcggcccgatcgtcgtcacatgcacgtcgtccggaatgcggaagcgcttttcgatgccgaagccgaagatgcgcagggcaatgatgtccttgcagccgttttccaccagcgcgtggattggtaccacgtcctgtacgccgccgtcggcgtaatatttgccgccaagcttttccaaccggaatgccggcaggtacgcgcttgcgagcagcatatcgcacagttcgtcctcgtcaaggtcggaggctttgagctccagctcctgatggtcggacagcgagtaggtgacgatgaaaaagtccgtgtcggaatggcagattttgtccgcgtccacgacctcagcgacccagttgcgcagcggcgtcacgtcaaagccgcggttgcgcacgatgtcggccacgctgcgcagcgtgctcttgagctcggagagcgggatgtcgcggttcatgagccggcgcatttcctcgtcgtccacgtccatgacctgggaaaagtggatattgttccagacgttttcggccttttccaggtcgtccatgacgatcatggcgccgttgagcgcaccgacggacgtgccggacacggcggaaaagcggatgcccgcctcgcgcagggctttccacgcgccgatctggtaagcgcccttcgcgccgccgccctcgagcgccagaccataggttttgttacgatccagtttcagttccatgtcggttctccaatctgtagatttttgcggcatggggcggcaggtcaaatgcgcccacgccgtcgtggatggcaatgtgggtatcgtcggtgcagtcggcggcgcagtcgtattcgctgcgcacgaaggccagccttgtctcttcgcacaggccggcgccggggcaggtgagctccacgtggcagcgcaccgggtgcgccgcgcggttgacgatcagcagcagcgcctcgtcctctgcttcctcgccgaaggcgtctcgcgtgcccgcgatgacgcgcagaacacacagcacgtcgcccgccggggcgaacacggcgacctcgccgcgcgtgagcgccgggtgcgcatggcgcagggctgtcagctgtgcgtaccactgcagcatctgcgtgtcgcacatctgcagcggcgcgcggttgaacgggtcgcacaggccctgcataccggcctcgtcgccgtagtagatcgacgggatgcccggcagccagaactgcacggctgccgccagaacctgcagctgcgcgccgcgtgcggccatggcgtccgtgatctcgagcgccgcaagctccgcgcgcgtgcggctgcgggggtcaaagtccagcgccagcgccgagcgcgtgcgcgccacgtcatggcttgccgtcaggttcatgagcgcgtagtacagcggccgcggatagttcagccgctggctcagcagcaggtcggcaagcgcgcgcgccgtgctgcgcccggtcaggaacgtcaccagtccgtcgcgcaggggatagttcatgacgctgtcgagcgcgtcgccgagcgcgtactgccgccgctcgccgtagctgaccttcgtcacggcgtcctcccagacctcaccgaggagcacgctgtcggggtcggtttctttggcagcgctgcgcatgccgcgcagcacatcgtccggcagttcgtcggccacgtccagccgccagccggacgcgccgtcgcgcagccaggtcttgacgatgctgcgctcgccggtgatcatatatttgcgccagtcgggattggcggcattgacggcgggcaggtctttgaaatcccaccagcacttgtagtcgtcggggtagtgcgcgaagctgtaccagcgcgcatagacggaactgcggctgttgtacgcgccgcagccggggtaatgccggaagcggttgaagtaccggctgtcagcgcccgtgtgagcgaacacgccgtcgagcacgatgcggatgccgcagtccgccgcggccgcgcagagcttcttgaagtccgcgttcgtgccgaggatggggtcgaccttccggtaatcgccggtgtcgtaccggtggttggaagcgctctcgaagatcgggttgaggtacagcaccgtcacgccgagcttctgcaggtagtgcagccggtcggcgatgccgcgcagagtgccgccgtagaaatccaccggtgcgtattcgccctccggcgtgttggcctgccactcgacgggttcgtcccagccggcgtggcagtgcacggtctggcccatgcggcggtggtgctccatgccgcgctgcgcggtggcagagctgtcgcgcgcgaagcggtcggggaagatctgatacatcacgccggtgcgaaaccatgccggggtcgtgaatccggcgcgatagaccgtcagacgccagccgtcacccggtgcgtcgcacagccgggcgtgccggccgtccggcgcggcgcacagccagcggatgccgccgtcgttgcacgcgagccggaagcggtagcgcagcgcctgcggcgcggcgggcatggtcacggccgcttcaaagccggcggccgtctgcgtcatggcgacggtgtcgctgtacgcatcgccgtagagttccacggcggcgtcgaacacgagcgcctccgtgtccgcgaaagcgaggcgcacggccgcaccggtctcgagcgcgccgatcgggctgcggaaggcctcgtcggccgcgtcgtgcttcggcgtggtgtcctccggcagcaggagcagatacaggtgcgcgtagtcctcggccgagcgcgtgaagctgaagtcctgcgacatggcctgccgctgcacgcggcagtaggcgtcatgatcgtcgtgatagagcgcgagcgcacggcggatcgtgtccgccagctcgtaggcgttgaagttggcaaacgagaagccggtgccctcgccggtgaaccggttatacggctgcacgctgtcgcgcaggccgccggtctcgcgcacaatcggcagcgtgccgtaacgcatggcgatcatctgcgacaggccgcatggctcgaagctcgacggcatgagcagaaaatcgctgcccgcgtacacgcggtgcgacagcgcctcgtcgtagccgatgtaggcgcacaggcggcccttgtgccgccactcggcgccgcgcataaagtcctcatattcggcgttgcccgtgccgaggagcacgaacgccatgtcctcgctgtccatgagctcgtcgagcacgcactgcaccaggtcgaagcccttttgcggcgtcatgcgcgtgaccatggcgacgatgggcgtgtgcgcgccgatctcgagaccgagctcccggcacagcgcggcgcggcaggcggccttgccgctcaggtcgtcggcggagtagggcgcggcgatgccgccgtcgtgtgcggggtcaaagacggcggtgtcgatgccgttgaggatgccggacagctggtgctgccgggcgttgagaatgccctcgagcccctcgccgtaggccgccgtgcggatctcaccggcgtagctcgggctgacggtgttgatgtggtcggcaaagacgcagccggccttgagcaggttcgcgcagccgttgagctccatgaattccggcgtgtaatagcgcgcgtcgatgccgagcaggtcctgcacgaattcgaacgagaacttgccctgataggcgatgttgtggatcgtcagcagcgtctgcatgcgcgactgcatcctgccggcgtactgtgttttcatcagcatgggcagcacggccgtgtgccagtcgttgcagtgcaggatctcgggcgtgaagtccagccggggcagcgcctccaggatcgcgcgggcgaaaaacgcatactgctcgccctcggcctcgccgccgaggtaaatgcggtcgccgaaataaaactcgttgtccacgaggtagatgacgatgccgtcgagcagcagccgctcgatgccgacgtactgatgccgccagccgagatcgatataaaaatctgtcaggtgcgtgacctgggatgcgtatttttccttgatcacgcggtggtacggcgtgatgatgcgtgcgtcaaagccgagcgcggccagacttttcggcagtgtgccgacgacgtctgcaaggccgccggtcttggccagcggtgcgcactcggcggccgccagcagcacgccgggcaggtcgcagcggcccttttcggccagcgctgcgcgcagttcaggtttcatggcgttccctcctttaccgggtcgtgaaggtgaagtatacagcggcaagctccggcagcgtcacgcgcgcggagtaggggagcgcgccgaacggcacgttctcgctgcggatctcgggcgcgttgtgcacgccggagccgccgaattcctcgctgtcgctcgacagcagctcgcgcagcacgccgcgcctgggcaggccgatgacaaaatcttcatagcgcacgggcgtgaagttgcacacgcacacgagccggcggccgttgcgcgccgtacgcaggaaggcgatggcgctgcgctcggcgtcgtccacgttcagccacgtgaagccgtcccagccgtcgtcgatgtcccagagtgcgcgggtgctgcggtagcaggcgttgagcgcgctgcaccagcgctgcatggccttgtgcattgggtagtcgagcagcagccagtcaagtccctgcttgtagttccactcgatgaactggccgaattccgaacccatgaacgtgagcttcttgcccgggtgcgcgaactgatagccgtagagcgcgcgcagggtggcaaacttctgctcataggtgccgtacatcttgtcgagcatcgacttcttgccgtgcacgacctcgtcgtgcgaaaacgcgaggatgaagttctcggagaaggcgtacatcatcgagaacgtcagcttgtcgtgatggtatttgcggaagtaggtgtcgagctccagatagtcgagcgtatcgtgcatgaagcccatatcccacttgaagcagaagccgaggccgccgtcatagggcggcttcgtcacaccggggtaggcggaggactcctccgcaaccgtcacgcagccgggccacgccgtgagcacggtcgtgttgagcttttgcagaaaggcgaccgcgccgaggttgatgttgccgccgtcgcggttcggcgtccattcgccgtcgcgccgggcgtagttgagatacagcatcgaggacactgcgtccacgcggatgccgtcgatgtgatagcggtcgaaaaacgacatggccgacgaaatgagaaagctctgcacctccggcatttcgtagtcgaaaatgagcgtgccccactccggatgctcggccatgcgcgcatccttgcactcgtagagccgcgtgccgtcaaagcgcgcgagcccgtgcgcgtccttcggaaagtgcgccgggacccagtccatgagcacgccgatgccggcgcggtggagcgtatcgacaaagtacatgaagtcctgcggcgtaccatagcggctggtgggggcgtagtacccggtcacctgatagccccaggagccctcgtaggggtattccgtcacgggcagcagctccacgtgcgtgtagtgcatctctcggcagtagtccgccagctcgtctgcgaccgagcggtaccacggcaggccggtctccggccggcgccaggagccgaggtgcacctcgtaaatgctcatcggcgcgcggtacacatcgcgcgctgcgcggcggcgcagatagctccggtcgtgccagacgtagccctcgagcgcccagaccttggatgcggtcgcgggcccggtctcgcagtgcgcggcgaaggggtcggccttgagcaccgtctgcccgtcgggggcggtgacggcgtatttatagagcgcaccgtcgcgcagaccggctacggtctgcacccatgtgccgtccggcagccggtccatcggcgttgccgccgtgtcccagccgttgaagtcgcccacgagcgcgacgcgctgcgcgtgcggcgcccagacagcgaagcggtgccccgccgcgccggggagcgcgtggcagccgaacgtgcggtaagcgtgcacggccgcgccggtatgaaattcctgcagctccggctccatgacagagccgggcgcgcgtcctgtcttatccatggcgcgcctccaatatcccagtctagcacgatcattataccgtgcccggcatgaaattccaactgttttttgcggacttgctttgacaatgcgcgccgcagccgctatacttgggacagatagaatgtatttgggaggcacggtatgtttactttcaatcactttaatttcaatgtcctcgatctcgagcgcagcgtgcgcttttatcatgacgccctcgggctggagcccgtgcgcacgaaggatgcggccgacggttcgttccgacttgtgtttctgggcgacgggcactcgccgtttcagctcgagctgaccggtctgcgcggccgcacgcagccgtatgacctcggggagggggagtttcacctcgcgttttccgtgccggacatggacgccgcgcacgcgaagcacgcggccatgggctgcatctgctttgaaaatcccggcatgggcatctacttcatcgaggacccggacgggtactggatcgagatcgtgccggaaaagtgaatccccacgcaggagacggaaaacgtctcctgtgtttttttgtatagcgaaaaccactcgcctagcgagtggttttcgctatacaatgaccggcgccccacagaaaaatctgcggggcgcgctttgttggccggtatgtgcgcttagtcgtccggcggcgacagccggcagatgtcgagtacggacacctcgaacgccgtacgctcgacggcgccggtgtccagcaccttgatgtagctgcggctttgcagccgcccttcgagggacacgcgcgtgcccacgtcccagagcgcggtctcgcacgcgcgcgcaccccaggtgatgcacggcaggtagtcgctgcggccgtagtgccggttcacggccagcatcaggtcgcagatgtcgcggcccatcggcgtcgtgcgcaggttcggcggcttgcagagcgtgccgctgagcaggatcaggttgcggtcatacggctcgtcgctgagcgaaatgtcgcgcgcgaacaccgtgatgaccagcttcgcgcccggcccgcggcggttgttgaacgagcgtacgtcgccgatcacgcacagccttgccgattcctccagcggcatctcggccagcagccgctcgcgcacgacgacgttcacgcggtcgatcgtgccggacagccgctgcgtctcgagcgggaaggtgaaaaagcgctcctgccggttttcgtgcgacagcacgggcggcgctgccagcgtgccgcagagctcggcatagttgttttgttccagttcgtccatgtgctgcacctctcttgttgggtaacacagcctatgtgccggcggcggaaaatatgcgtcttgtgcaatgcggccggacgcggtataataagaatacctatttttcgtgtctcatcagaaaggacgaacgatcatggaacttcgagagattctttcccgctgcgaccacacgctcctgcgcgtggatgccaccgcggcggagatccgcgccctctgcgatcagggcatgcgttatggttgcgccagcgtgtgcatcccgccgtgccatgtcgccggggcgaagaaatatgtcggcgaccgcctgcgcatctgcacggtcatcggcttcccgaatgggtacaacaccccggccgtcaaggcgttcgaggcggcggaagccatccgcaacggcgccgatgaggtggacatggtcatcaatctggccatggtcaaggacggctgctgggacgatgtcgcggccgatatccgcgccgtgcgtgaggtcagccgcggccgcatcctcaaggtcatcattgagtgctgcctgctgaccgaggaggaaaagcgcatgctctgccgcatcgtgtccgacagcggagccgactatatcaagacctccaccggcttttccaccggcggcgccacggcggacgatgtgcgcctgctgcgcacctgctgcccgccgcacgtgaaggtcaaagccgccggcggcatcgcaagccttgccgacgcggaggagtttatccgcctcggcgcggaccggctcggcaccagccgcatcgtgaagatcgccatggcgcaggagcagcaggctgccgaggcagcggccgcgccgcagcagccggaagcggctgcacagccagagacgccggaacagcaggacaccacttactgagtctgccgggcggcgagtttttgccgcacggttcgccccagccacacgccggggatggcaagtccaaaccagaacagggtatacagcgggcagatctgcccgaggacgttgagcggccggtctgcgtagttccagacgttccagccaaggcgcaggttgaccagcacgccggtgaaatactccaccgtcgtgacggcggccgcgcacagcgtccagcgccgccagagcacggtgcgctcgcgccccgcgatcagatagatcagcacggcgcacacgccgccgcacagcagcatcgaccagtgcgtccggccgcgccaaagcagctccagcccgccgtagcccagtccgccggcggtgaacacaccgccgtattcgagtactttcatatggcttcgcctccgtggaggagtatgtccccggaaggtgggattcagtccgcattttttgctcgcccggcgcagaaaacccttgacagaccgtgccgggactgctatagtataaaagctgacaacaaagtgggcgccctctgggcagcctcacccggccgcaaaggcggtccgcggtcaataaaacccgctcccgtccgggagatatgtgtgttttatgcgcgcggatgtgtcttgcatccgtgcttttttgttctcggagcgatcgctcccgatgcaaccaatggaggtgtgttcgtatcgcaactgcaaactatcagatcaacgaagagatccgcgataaggaagtccgcgtcatcggcgctgacggcgctcagctgggcatcatgtcctcggccgctgcgctggagatcgccgaggggaaggacctcgacctcgtgaagatcgctccgggttccaacccaccggtctgcaagatcatggactacggcaagtaccgtttcgagcaggccaagcgcgagaaggaagccagaaaaaatcagcatgtgatcgaagtcaaggagatccgcatgtcgcccggcatcggcgagaacgacttcaacaccaagctgaaaaacggccagaagttcctgcagggcggcgaccgcctgaaggtgacgatccgcttccgcggccgtgaaatggcgcacaccaatatcggtgaacagctcctgcgtgactttgccgccaagtgcgcggacattgccaacctcgacaagcagcccaagctggagggacgcaatatgtccatgttcctgtcgccaaagccgcagaacaccaataataagaagtaagcaaaccaaggaaggagaaaatacaatgcccaaactgaaatctcacagtggcgcgaagaagagattcaatctcaccaagaacggcaaggtcaagcgtgcccatgcgttcaagagccacattcttaccaagaaggataccaagcgctgccgtcgtctgcgttccaccacttatgcggatgcgactaccgaagcgaccatcagaaaaatgattccttataaataaggattgaccgcacaataggaggaaacaacaatggcaagagttaagggcgcgatgatgacgcgcaaacatagaaaaaagatcctcggcctggccaagggctactggggcaacaagtcccgccactataagatggccaaccagcagatgatgaagtccggccgctacgcttacgtcggccgcaagcagaagaagagagacttccgtcagctgtggatcacccgtatcagcgccggctgcaaagccaacggcatgaactactccacctttatgcacggcctgaagctggccggcatcgacatgaaccgcaagatgctctccgagactgcgattcatgactccgctgcgttcaccgctctgtgcgagcaggcgaaggctgccctgaactgagtttctaagttaaaaaccccgccatccgaccggatggcggggtttttgtatgttcttcagtcgacctgccgcgccacgaccagaaagcggccgttcgccgtgtggtaggcacaggtggacagcgtgagcagccggtcgccgggctggatcgtgatgccggtgtcatagcaccggttttgttcgataaacgtgcagtactgtgcaaactgctccgggtccgtgccgatgcagtcataatatcgaaaggcgtcagagccctcagcggggatttccgtttcgatcgcggccacgacctcatacgaatgggaggcgtagagcgtgtcaaactgcacgatcgggtgcgcagcgcgaaatgccgcatccttgtaggagatcagcgagccgaacatgctgccgtctttcatgtggtgcccgtagatgaggatgttgtccgccgtgcgcacatcgcagttttcggcgacatacagcgtgccgcggtacgaccacttgccgtagaagtccatgtgcaggtacttgcccggcgtgtcgggggcaaacatgacgacgttgttgatgttggtgccgtcgatccgcagccagccgatcgtatccgcattgtcggcggcaactgcacgcacctgctccatggcctccgcactggctgcgtcatgcgcggcggcgagcgcctctgcgacagcgcggtcgctgcggtcactgtgccagtaccagccgagcacgccaacgcagaccaagaatccgacaatgcagacgacgcggatcacgatgagaacggtttttttcatacaaaactcctgataagaaaatgggcagtgtcatttgacgctgcccattttaactgcatgagagtgaagatcaggcgccgtggtgcttgctcttcctgcggttgtagtaggtcgcagcgaaggtcgccacgaagatcactgccagcgcaatgaccagccagatcagacgtgtgtcgccggtcttgggggtgttcgacttgctgccatccggattattgccgtccggattgttgccgtccggattattgccgtccggattgttgccgtccggattgttgccatccgggccattcccgtccggattgttggggtcggtgccgttgccgttatcgccgccgccgttatcgccgccgccgttgttgccgccgccgttatcgccgccgttgttgccgccgccgttatcgccgccgccgttatcgccgccgttatcgccgccgttgttgccgccgccgttatcgccgccgttatc

SEQ ID NO: 13960 - DNA, 182684 bp, Unknown
  gut microbiota DNA sequence
ttatcgccgccgttgttgccgccgttgtcgccgccgttgtcgccgccgttatcgccgccgttgtcgccgccgttatcattgccctcgccgaggatgacaacgatattgatgtagtgcagaccgaagttcgtggcaaacgccttgatggtattcgtgcccttgacatggatgcccgtgccgccggggtaggtgatcccgccgacgccgacgatggtggcctcctgcacatccgcatcaatgctccagtcgtggacatggtggttggtgcaggtgatggtcacgggggaccacgccgtcacttccatgccggcatgatagggcttcgtgtgcgtgccgagcgcgtccgtgtaggtcacggagaaggacgcatcgtggtcatagtcgcgcaagactgtcaaaaacaggtgcgtgctcacgcccgccacgtcgccggccgccgccggggtcgtgccgaacgaaaacagcgacagcgtgaatgccagcaagaagatggcaatcatgagtgcctgcttgcgatgagttgcttttttcatgttgattacatccgcctttcacattagctggtgatcgataaaaagagatcgcgagggagtgcgttgggaacggttgctgtgggtgaaaattgcattgtttacagtctattcataaaatagcacattgataaacgctcgtcaataactataatgcatgagacgcggaaaatgttgcatcattttgcaaatgtgccaaattttttcccgtttgcgcatttttttcacagagcggcgccatgtgtccggcagtggtgcagcgagtgaaaaaaagcatcggatcaaaagcgcagaaatcccataaattaggtttgacaatcgccgggcggagtgttaacattacgaaatgctgattaacggggttaacaaaaggaggatggttcatgcaattgcagcgactgactgaggaattgctgctgacggttacttctttgaaccggtcctgcataccgcagagtgtgcaggagcacctgaagggcgaaaacttcctgctgagctacctcgatgagcacggcgggtgcagtacgccgggcgtgctgcgggaggtcctgggcgtgagcgcgccgcgcacggcggccatgctgcgcgcgctggaggaaaaggggatgctgcgccgctgtgccgacagctatgaccggcgccgcgtcgttgtgcacctgacggagcttggccgccagacggcggaacagatgcacacgacattgtgtgcgcacgtgcagcgcgttctcgagcagctgggtgagcaggattcccgcgaactgatccgcctgctggggcgcatcacggagatcgaggcaagcgcctgaacggtgtgcgcgggtgtttcgatgcaggatgtataaggagacagtttaatgaagaaatatattcaggaacataaatatgttctgttggtgctgtatttgcccatttatctgatctggtttgcgctggtcgagcgcatggtgccttcgacggagggctgctttgtatcctatctgccgctggacgacaagatcccctttctgccggggttcattctggcgtatgtgctctggtatccgtttttgatcgtcccggtcgttgtgacgctgctcaaagacgatcgccgcgcgttcatccgctatgcggcgtttatcattgcgggcttttccatctcgctgacgatctgcatgatctggccgaactgccagctcctgcgcccgtccgtggtggacacgagcacgctgtgcggctggctggtcaatgcgatctattcggccgacacgccgacgaacgtcctgccgagtatgcacgtggtcggctgtatggccgtgctggccgtgacgttcgacagtaagtatttaaaaaaggtgcgcatcccggcggtcatcatcgccgctgcgatctgcgcggcgacggtgtttgtcaagcagcactccattctggacgtgtttgcggcgctcgcgctgtcgctggtgctgtacctgatcatctatgtcgcggcgcgccggatcgtggaccggcgtcagccgacggccacagcctgagagaaaccaaacagagaaacagatagacgaggataaagaggagaaatatgagtgacccgaagatcctgaaaaagatggagcaggaaaaccagaaatacaaaccgaagccggcagtcgtggccgtctactggatcctgcgtctgatcgttatcggcgtcatggtcatgacgatcatccataagaactatgagagcacgttcgtgtgcgtgctggtgctgattttgttcatgctgccgaggttcgtggagcgcaacttccgcatcgagctgccgagcacgctggagatcattatcctggtcttcattttcgcggcagagatcctcggcgagctcaagagctatttcatcacctacccgcactgggactccatgctgcacacgacgacgggcttcatcagcgcggcgttcggctttgccatggtggatctgctcaaccgcaacaagccgcagcacttcaagctctcgccggtgtttctggcgctggtggcgttctgcttttccatgacggtcggcgtgctgtgggagtttttcgagttttcgatggactacctgttccacatggacatgcagaaggacatgatcatccactccttcgcctccgtgacgctcgacccgacgaacagcaatattcccatcctggtggacaacatcacggacgtggccatcaatggcaaatcgctcggtcttggcggctatctggatgtgggcctgtatgatacgatgcaggacctgtttgtcaactttgtcggtgcgctcacgttcagcgttatcggctacttcagcgccaagtccggcaacaacaagatcgccaagcagttcgtgccggtggtcctgccggaggagccgaaggcggagcgcgaaccggagcaaaagccggaagcgacaaaataaaagcaatccccgccggacgcagcctgcgtccggcggggattgcttgtttgggtcagaagcggaactcaaaatcgagatcgtagatgctcaccgtgtcgccttcctcgatgcccatggcctcgagccggtcgaacaggccggactggcgcagcacgcggtcaaagtacatgcgcgattcgtagtcgccgaagttgatcgagctcatgagccgctgcagccacggcccttcgacgacccagagatcgtcaaagtggcggatctgcagctcgtcgctcgtgccgacctccggctcgggcgggacgtagtcggcctcgtacggcggcatcggcgggatctcggcgagcttggccgcgcatgcctgaatgagctcgcgcgtgccggtgtgggcggcagcgctcatctcaaagaattcgtagccctgcgcctcgacgtgtgcgcgcaggcggtcgatgttcgtgcggtcgtcgccgagcaggtcgcatttgttggcggcgacgatctgcgtgcgcgaggccagcacgtcgctgtaggcgcgcagctcggcgttgatggcctcaaagtcctcgaccgggtcgcgcccctcgctgccggagacgtccaccagatgcacgagcaggcggcagcggtcgatgtggcgcaggaagtcgtggccgaggccggcaccgtcgctcgcgccctcgatgatgcccggaatgtccgccatgacgaacgacgaaccctccgacacgtacacgacgcccagtttggggaagagggtcgtgaagtggtagtttgcgatcttcgggtgcgccttcgacaccacggacagcagcgtgctcttgcccacattcgggaagccgacgaggcccacgtccgccagcagcttcagctcgagcaggatcgtgtggctctcgcccggtaggccgggtttggcaaagcgcggcacctgccgcgtcggggtggcaaagtgctggttgccccagccgccgcgcccgccgcgcgcggccacgaacggctcgcccgaggacatgtcgtgcatgatcgcgccgctgtccgcgtcgcgcagcagggtgccgcgcggcacgcggatgtgcagactctggcccacgcggccggagcagcgcttgccctgaccgtcggcaccgttggcggccacatatttgcgcttgtagcgaaagtccatgagcgtggacatgttgtcgtccacttcaaagatgatgtcgccgccgcgcccgccgtcgccgccgtccgggccgccggcggccacatatttctcgcggtggaaggtcactgcgccgttgccgccgtcgcccgcgcgcacggtgatggtcactttatcaacaaatggcgaagccatggtcattcctcactttcgttgccgggcagcccggcgggggatagaaaaacggggcgggcgcgatgcccaccccgtttgcgattactgtgcgatctcctcgtaaacagagacctgcttgcgatccttgtccttgcgctcgaacttcacgacgccgtccacgagggcgaagagcgtgtcgtccttacccttgccgacgttgatgccggggtggatcttcgttccgcgctgtctgacgaggatgttgccggccagaacaaactgaccgtcggctctcttggggccaaggcgcttcgactcactgtcgcggccgttcttggtggaacccatgccttttttatgtgccatttcgaattacacctccatgtgtcaaaatcagttgcggaaatcaggcctcgatcttcgtgatctcgaccttggtgtagggctgtctgtggccctgtgttctgcgatagccttttttcggcttcatcttgtagacgcggatcttcttgctcttgccgtttttgacgacattgccggaaacgacggcgttttccaccacgggggtgccgaaaacagccttgtcctcgtcgatgacagccagaacgcggtcaaacttcacagtctcgccggcctcgacatccagcttctcgacgaagatgacgtcgccctcagccacgcggtactgcttaccgccggtaacgatgatagcgtgcttcaaactcgttgcacctgcctctctgtagagtctcgctcttgtgggcgggaggcgcacctccgcttggtacccactcaatgcggccttgacagtttatcattccggacaggttttgtcaacggtttttcccgggacatggcgaagtttttcgcggggatcgcaattttgcggcggatatggtaaagtggcagcgagagagggcggtgcgatgaagcgcctggtcaatgccattacctgcacgcgctttgtatttgcgctcattctggtgcttgcggcgccgggttcggcgtggttctgggcggcgtatggtctcggcgcggtcagtgacgtgctggacggtctgctcgcgcggcgctttggggtgcagagcgacggcggggcaagactcgacagcgcggcggacattgcgttcctgctcgcactcacggcggcgctgctgcgcgcgcggcagttggcgtgctggctgctgtacgcggcgggcgcagtgctgctcatccgtagtgtgacctatgccgccgggttttataaattccgcacgtttgtgtccctgtatacaacattaaatagagcagcaggcgtcgtgctggtcggctatccggtgcttgcggtgctgctggggcagggaacggccgcgtggcttgcggcggccgccgccgggctttccgcactggaagagctggtgctggtgctgcgcgcctggacgccggcccccgatgtgcgcggcctgctatggatagaaaaaccacggcgctgaaatcagcgccgtggttttgcgtcccgggaaactcagccgcagatggccttcgtgtcgcgggcgatgacgagctcctcgttcgtcgggatgacgaacaccttgaccttggagtcgggggtggagatcatgatgtcttcgccgcgcttgctgttggcgaccgggtcgatcttcacgcccagatagccgaagtactcggcgatggcggcgcgggaggacttgctgttctcgccgacgccggcggtgaagatgatggcgtcgacgccgttcatggccgcgacataggagccgacgaccttggcgacccagtagtggaacatgtcgagcgcgagctgcgcgcggtcgttgccctcggcagcggcggcatcgagatcgcggaagtcggagctgacgccggagacgccgagcacgccggacttcttgttgaggatgttgagcatctcgtcgatgctgatgccatacttgttcatgatgaactggatgacgccggcgtcgagatcgccgcagcgggtgcccatcggcaggccgaccagcggggtgaagcccatggacgtgtcaacgcacttgccgccgtcgatcgcgcagatggagctgccgttgcccatgtggcaggagatgagcttgagctcttcgatgggcttgcccatgagctcggcgcagcgggcggacacgtagcggtggctcgtgccgtggaagccgtagcggcggatgccgtcgttctggtagtattcataaggaatggcgtacatataggccttgccgggcatggtctggtggaacgcggtgtcaaacacggcgaccatcggcacgtcgtcgcccatgacggcgcggcaggcgttgatgccggtgatgttggcggggttgtgcagcggggcgaacggcgtgcactcctcgagggcagccatgacggcgtcgtcgatcttgacggagcaggcgaacttctcgccgccgtggacgacgcggtggccgacggcgtcgatctccttcatggaggcgaccacaccatactcggcgctggtcagcttgtcgatgaccgcggcgatggcttcggagtgcgtgggcatcggcagatcctcgtcaaagacgggtttgccgccgacgagcggggtgtgcttcagatggccgtcgaggccgatgcgctcgcacaggcccttggccaggacgtgttcggtctccatgtcgatcagctgatacttcagggaagaactgccggcattgatgacaagaattttcatagtcagattcctttctcatatgaaatattgtaattttcgcaaaaccacagtattatgatgccataacactcttattgtaatcatttcagtggaaaacgcaagtatttttcgaaagaaggtgcaaaaatgggaaatgtcatcggcatcgttgcggagtataacccgtttcacaacggccatgcacggctcatcgagcagacgcgcgcgcgtctgggcgcggactgcccggtcgtgtgcgtcatgtcgggcgactttgtgcagcgcggcagcccggcggtgtatgcgaagtttgcgcgcgcggaggccgctgcccgctgcggggcggatctggtgctggagctgccgctgccgtgggcgctgtcgtcggcggagggctttgcccgcggcgccgtggggctgctgggcagtctcggcgtggtgacgcatctgggcttcggcagcgagtgcggcgagctggagccgctgcagcgggtggccgaggcgctgctcgatccgctgctgggcgaagacctgcgcgccgagctgcaggccggcatcccgtttgcggcggcgcggcagcaggcggtcgcgcggcgcgtgggcgcgctggcagagctgctgcaggcgccgaacaacatcctcgccgtggagtatctcaaggcgatctttgaccagcggcttgatctgcatccgctgacgatcctgcgcaccggcgcgcagcatgaccgtccggcggagggcaatgtgcgctcggcgagcgagctgcgcacgcgcatcggcgcaggggagaacgtgtccgcctttctgccgagggcggcggcggagatcagtgcccgggaaaagacgctcggtcgcgggccggtgctgccggaggcgctggagagcgcaatcctctcgcgcctgcggatgctgccgcagacggcttacaacgcgctgcccggcgcgtccgaggggctgggcaacggtctgtaccgcgccgcgcacgaggagccgacgctcgacggcgtgctcgcggctgcaaagtccaagcgctacgcgctctcgcgcatccggcgcatgacgatgtgcgcggccctcggcgtcactgccggcatggacgccggcacgccgccgtatgcgcgtgtactggccatcggcgcgcagggcagggagctgctgcgcgcgatcgacgcgcgcacggcggcgccggtcatcacgaagccggccgccggacggaacctgccgggcgcagccggagaaatatttgccctgacggcggatgcgcacgatctctacgtgctcggctgccctgccagagaggagcgccgctgcggcggcgactggcgtgcgagcccgttcgtgctgtgaccggcagagtgcgcaaagtattcgaaattttgatatgaatattttgtgaaattgatattgcatttcttgcaaaaagatagtataatgccgtcatattcatttgaaggacatttgtccgcgcgctgcggacagcgcccggagaagaaatgattggaggaaatacaatgaaaaaagcgattgctctgctgctcgctctggtcatggtgttcgcgctgtgcgcttgcggcggcggcgacaagggcacggccgacaacggcgagaaggtcgttaagatcggcgtgttcgagcccgccagcggcgactccggcgccggcggcaagaaggaaatgctcggcatgcagtatgccaaccaggagaccccgaccgtcgagatcggcggcgagacctacaaggtcgagctcgtctactccgacaacggttccgattctgcgaaggctgtctcggcggcttccaagctcgtcaatgagaaggtttccctcgtgctcggttcctacggctccggcgtgtccatcgccgcgtccgacacgttcaagcaggccggcatcccggccatcggcgtgacgtgcacgaacccgaacgttacggccggcaacagccactacttccgcatctgcttcctggatccgttccagggcactgtccttgccaattatgcttcttccgagctcaaggccaagaaggcctactgcctcggcgagaacggcaacgagtatgaccagggcctggtcaccttcttcaagcaggcatttgagaaggccggcggcaccgtcgtcactgactccttcccgaaggacaactccgacttcagctcctacctgaacaaggcgaaggatcagggctgcgacgtgttctttgcacccgtgtcgatcgcgtattccacgcagctcgtttcccaagcggcttccctgaacatcggcatcccgttcctcggctccgatacgtgggatgacaacatggtcctgcaggctgccaagggcaccaacgttcaggtgttcgtttccaccttctacgcagaaggcggcaacaagaccttcgacgacggcatcaaggcctatatcaacggcaatgccgacgccaagaccaccaacggcggcgacgataccatctccgcagtgacggccatgggctatgacgtttattatgttgcgctcgaggcgctgaaggctgccggttccaccgatccggccaaggtcatggaagcgctgcccggcgtgacctatgacggcgtgtccggccacatcgcctttgacgagaccggcgacgcgatccgcgacactgcttatatcaagaccatcgacacggccgccaacgtctggaagttcgtgacgcagcagaaggcttcctgagcttctgcctcggtctgagatccaaaaatccggggggagcttcggctccccctttgggattttgagccgctgcgaaagctgcggaagctccgcggttttcgcggcggctgaatgtccgcattcgtaaacgatagagagggaaacagatggaatttctagtcgcacaaattttatccggcgtctcgctgggcggccagtatgccctgatcgccatcggttatacgatggtctacggcattctgcgtctcattaacttcgcccacggcgacgtgttcatgtgtgcaggcctgatgatggtcttcatgtgcgcgtccctgccggtgtacgtatccattccgctcatgctcgtgctgacggtcctgctcggcttcgtcatcgagcgcgcggcctataagcccctgcgcagcgcgccgcgtatgtccgtcatgatctcggccatcggcgtgagttacctgctgcagaacgtggcgctgtatgccaccggcggccagccgcagacgtatccgtcgctgccgttcgtgtccggcacggtcacgatcctcggcgcgtccacgcactgggtcacggtcattacgcccgtgctcgtgatcgtgctcgtgctgctgctgcagtggctcatcaaccacacgaagatcggcatggccatgcgcgcggttgcgaaggacttcgagaccagccagctcatgggcatcaagatcaacaaggtcatctccgtgacgtttatcatcggctcgttcctggcggccgtcggctcgctgctgtacttcacgaactacccgaccgtcattccgacctccggcgccatgcccggcctgaaggcgttcgtcgcggcggtgttcggtggcatcggttcgatccccggcgccgtcatcggcgcgttcatcatcggcatctgcgagacgctcatcaagggcaccagcatgacggtgttctccgatgcgttcacgttcgcgctgctgatcgtcgtcctcgtggtcaagcccaccggcctgttcggtgaaaaggccacggacaaagtctgagagggggggatcactgtgctgaaagcgaaagacaaagaagcacgccgcggcaacctgatcaccttcgccatcgtgctcgcgctcacgctcgtgacgatggtactggagaatgtggtgtctcccggctccctgctctttacggtcatcaaaaagggtgcggtgtactcgctcgtcgccgtgtccatgaacctgctcaacggctttaccggcctgttctcgctcggtcaggcgggcttcatgctcctcggcgcgtatgcctatgcgatcttcatgatcccggatgccgcgcgcgatggcgtgtattacctcttcgaggggtcgagcatccacttctccttccaggagatgttccagcatctgttcggcgccaccggcttcggcggcggcgtgagtctggtgctcggcgtgctcgtggccatcattttcgcgggcctgatcgccgcgttcttcgcgtatctgatcggcctgccggtcctgcgcctcaagagcgactatctggccatcgccacgctcggctttgccgagatcctgcgtgccatcttccagtggcagacgctcggcaaggtcaccaacggcgccaacatcctcaagggctatccgacgtttgcggatttcaacatcacgaatgcttccggcaaggtactcttccgcctgagtgcggtcgtgccgattttgcttgccggtatctgcattttccttattgtcctgctcatcaattcgtcctacggtcgcgccttcaaggccatccgtgacgatgagatcgcggcggaggccatgggcgtgaacctcgccaagcacaagagcctgtcgtttgtcatcagctcgtttttcgcgggcgtgtcgggcgcgctctttgccatgtttgccacgaccgtgcaggccaaggtgttcacctcggccatgacctatgagatcctgctcatcgtcgtcatcggcggcatcggctccgtctccggcagctgcatcgcctccttcctgtacatcgcctgctccgagtggtggctgcgcttcctcgataacgaggcgtacatcggctcgttcaaggtgccgctgctgcgcaacggtttccgtatggtcgtgttctcgatcatcatcatgatcgtcgtgctcttcttccgcaagggcatcatgggcgagcgcgagctgccggatctgttccgtaagcgcgcgaaaaaggaaaaaaagaacgtagttgaggagggcaaagcagatgagtaaagacatcctcagcgtggaaaatatcacgatgcagttcggcggcgtcgtggcagtcaacaacctgtcgctgcatatccccgaggggcagatcgtggcgctcatcggcccgaacggcgccggcaagaccacggccttcaactgcatcaccggcgtgtatgagccgacgaacggcctcgtcaaattccttgacgagccgatggtccgcaaccatccgaccggcaagatgaaaaagctctacaagggcgaaaatccactgctctacacggcggagtatcatccggaggatgagacgaaagagcagatgctcgcgcgcgacccgctggccgggacgggcaagatcgtctcgccgacgccggacaggatcacgaagctcggtattgcccgcacgttccagaacatccgcctgtggaagagcatgacggtgtttgaaaacgtgctcgtagcaaagcatatgcgcgccaggcagaacgtgttttccgcgaccttccgcggcaacgccaaggaagaaaagcgcatgcgcgacgagaccatggctctgctcgtcgagcaggggctggagaaatacaaggacgacattgcgacgagtctgccctacggcatccagcgccggctggagatcgcccgcgcgctggcgacggatccgaagctgctgctgctcgacgagccggcggccggcatgaacccgcaggagacgctcgagctcgcggcgttcatccacgagctgcgcgagaaatacggcctgacgatcttcctgatcgagcaccatatggatctggtcatgcggatctccgattacatttacgtcattgacttcggcagcaagatcgccgagggcatcccgcaggaagtccagaacaatcagcacgtcattgacgcctatctgggggttgtggaagatgagtgaaacgattctgaaaattgaagatctgcaggtgcgctatggcggcattgaggctgtcaagggcatttcattcgatgtgcagcaggggcagatcgttacgctgatcggctccaacggcgcgggcaagagctccacgctgcgcacgatctctggtcttgtcaagccgagcggcggcaagatcactttccagggggaagacatcaccggcaaggacccgacccagatcgtcacgcagggcgtgacgctcgtgccggagggacgccgcattttcccggacatgaccgtgctggaaaacctgaagatcggcgcttacctgcgcaaggacgatctgtcagaggacctcgagtgggtctacagcctgttcccgcgcctgaaagagcgcagctggcaggccggcggcacgctctccggcggcgagcagcagatgcttgcggtcggccgcgcgctcatgagccgcccgaagctgctcatgatggacgagccgtcgctcggtctcgcgccgctggtcgtgcgcgatatcttctccatcattcaggagatcaacaagcagggcgtgacgatcctgctcattgagcagaacgcaaacatggccctcaagatcgccgatatcggctacgtgctcgagaccggccgcatcacgctcaccggcagcggggaggaactgctgacgaacgacgcggtgcgcgcggcgtacctcggcgcataacggcatagatgacccagacggaaggacgcccgcaggcgcccttccgtttttttcggaacatttcttgaccacgcgcgtccaatcctgtacaatgcagttgaaaaccatcgaaccatagaggtgtgctatgaaaaagtttttttcaggatttctggtgctgtgcctgtcgctcgcactgctgaccgcctgcggaaaggatgggcagactggcaagacggtggcggccggcggcctgacctttgccaagagctacagcgaggtctactccgcgctgaccgatgcgcagaaagcgattgcggaccgcgacaagtccctcaatatgaccgacggcgcttccgacgacccggagtccggcggcaaaggcgacggtgaaggcgagggcacattctactccggcacgaacgtgcaggtcgcgggcgtcgacgagggcgatatcgtcaagaccgacggcacgtatatctacatcctgcgcggcagcgaactgatcgtcatgcaggcggacggcgcggacgtcacggacgtgtccaatgtctttgtcggtcaggactgggagcagacgacgaccgaggacggtcagacccacacgcaggaaaagctgccgctggagctgtatctggccgacggccgcgcggtcgtcctctcgtcgtataccgactggacgggcagcgacacgtcctcagatgagctttccggcagcggcaataattatgtcacagtcgatatttatgacgtctccgacccggcagccccgacgctggtccagtcgttcgggcaggacggctacgagatcgcctcgcgcatggtcggtggcgtgctctacctgtgcacgtcgtattatcccggcgcgccggaaaagggcgacgagactacgtttgctccccggctgtatgacggggacacggcgtcggtcgtgccgtgcgacagcatcggcctcatgccgtacaacaactccatgacctacgcggtcgtggcgtcgtatgacattgcggccggcacgcggctctccagccagtccgtgctcggcggcggggaaacggtgtacatgacggcggagaatctctacctgtgcgcaagcgtctatgacgacggcgcgggcaaggcccataaggacggcagctacacggtcacggactatacctccagcgtcaacacggcggtcaaccgctttgcgatcgccgacggcaagctcacatttgccgccaatggcactgtgcccggcgcgctcaacaaccagttctcgctcgacgagcgcgacggctatctgcgcatggccacgaccgagcagacgtattcctacagcgtctaccgcgatgaaaagcatgactttgaaaacacgaaaaccaatgacgacgccacgcagacgagcaatgatgtgtacgtgctcgaccgtgacctgaacaccgtcggcagcgtggccgggatcgccgaaggggagacggtgttctccgcgcgcttcgacggggattacggctatctgtgcacctaccgccagacggatccggtctttgccgtcgatctgaccgccccgaccgatccgaaggtcgtcggtgagctcaagctcagcggctattccgactatctgcacgtctggtcagacgggatgctcttcggcctcggcatggagacgacggccgtggatggcggcgcgaccgtggacggcatgaagctcgtcatgatcgacacgtccgatcctgccaagctgcacgatctgcacacgcagacccttgatgccgactatagcgaggcactgaataatcacaaggcaattctggtggacagcgacaaggacctgatcgctttcccggccgagaacagctacctcgtctacggctattcggcggacgacggcttcacgctgcgtaaggagatccccgtctcgcagtgggacgagaacaaccgcggcctgtatatcggcgactacttctatgtcgtcggttccgatcaggtgaacgtgctcgacctgggcacgcttgagaatgtggcgcaggcgatcatcccgcgcgggtaaacaaccgaagatcttctgacaggcggtgcgcgcagacgcaccgcctgtttacatttttgcgccgctgtggtaaactgatacattgagcgaatatcgcaacaagggaggcggcaccgtgctcgaaaagctgcgacaaattgaaaaccggtacagcgagctggagagcaagctggccgaccccgcgtattattccgaccccgcggtgttcacaaagctctgccgcgagcagcgcgagctgcagccggtcgtggagacctaccgggcgtataccgcctgtcaggcgcagatcgcgcaggcggaggcgctgctgagcgaccccgagctgcacgagatcgcgcgcgaggagatcgatctcggccgtgcccgctgcgcggagctcgagcagcagctgcgtgtgctgctgctgccgcgcgacccgaacgatgaccgcaacgtcattctggagatccgcaccggcgtcggcggggaagaatcggcgctctttgcgcatagtctttatcgaatgtacaatatgtacgccgacgcgcacgggtggaagaccgagatcgccaacctcaacgagacggagctcggcggcgtgcgcgaggcgagtctgctcatcagcggacagggggcgtactcccgcctgaagtttgaaagcggggtgcaccgcgtccagcgcgtgccggagacggagaccggcggccgcatccacaccagcaccgccaccgtggccgtgctgccggagatggacgccgtggaggtgcacatcgacccgaaggatctgcagatcgacacctaccgcagctccggcgccggcggccagcacgtcaacaagaccgagagcgccatccgcatcacgcacctgccgaccggcacggtcgtcgagtgtcaggatgagcgcagccagtataaaaacaaggatcgcgcgatgaagatcctggcctcacgcctgtatgccgcggaaagtgcccggcagaatgccgcgcgctcggccgagcggcgcagccaggtcggcacagggatgcgcaacgagcgcatccgcacctacaacttcccgcaggggcgggtgacggatcaccgcatcgggctgacgctctataagctcgatcaggtgctcgacggcgatctggatgagatcattgatgcgctcacactggccgatcaggccgaaaagctgcgcgcatccgcggaggaaacatgaacacgaaacgaatcacaaccgagatcgcgcaggcagcggatgccatccgcgccgggcagctcgtcgccgtcccgacggagacggtctacggccttgccggcaacggactggatcccgccgccgtcgcgcagatctatgaagtcaaaggccgaccgagcgtcaagccgctgtcgctgatggtgcacgacgcatccgccatggcgcgctactgcgccgatgtgccgccggcggcatacacgctggccgaggcgttctggcccggcccgctcacgatcgtgctgcgggcacaggactgcgtgcccgagatcgtgcgcgcgggtgggcagaccgtcggcctgcgctgcccggatcacccggccacgctggcgctcatcgaggccgcgcagctgccgctggccgcgccgtcggccaatccctccggcgcgccgagcccgaaaacggcagacgatgtgctggcgtatttcaatgggcagatcgcggccgtcatcgacggcgggccctgcggcatcggccgggagtccacgctcgtcgatctctcgcacacgccgtaccgcattctgcgctccgccgccgtgccggacgatgccgtctgggacgcgctcgtgcggaaaatgcacattgtcggcatcacgggcggcacgggctgcgggaaaacgaccgcgctcatggagctggagcgtcagggcgcgctcgtcatcgactgcgacgcggtgtatcacgagctgctggcgtccaataccgccatgctcgcggagatcaatgcccgttttccgggtacaatagaaaatgggacgctgcagcgaaagcggctcggcgcggtcgtgttcgcggacgcggcggcgctcgacgacctcaacgccatcacgcaccggtatgtccgtgccgaggtgcgcgctcgcctgcgcgcgtgggcgcggcggggcggcacggtcgcggcgatcgacgccatcgcgctcatcgagagcgggctggcggagctgtgcactgtcaccatcggcgtgacggcgccgcgtgaggtgcgcatcgagcggctcatcgcgcgcgagggcgtgacgcgcgattatgccgaggcgcgcatcgacgcgcagaagcccaacgaatggtttgcccaacattgcagctacgtgctggataacggcggcacgctcgccgattttcagcgccgctgccatcaactgatacaggaggtgctctcatgagcgaagataaggaactcaagcagtggaaggaaaagctgttttatcagccgaaaaacggctatgatcggatcgacgccgagcaggccggggagatctttgcctacgccgagggatataagcagtttctcgacgccgcgcgcacagagcgcgaggccgtcaaggaggccatccgcatggcggaggccgagggctttgtgccgtatacgttcggcatggagctgcagccgggctcgaaggtgtatgtcaacaaccgcggcaaggcgctcatgctggccgtgctcgggcagcagccgcttgaccacggctgcgtgatcgcgggcgcgcacatcgactccccgcgtctcgatctcaagcagacgccgatgtatgaggactcggagctggcgtatttcaagacgcactattacggcggcatcaagaagtaccagtgggtcacgatcccgctggagctgcacggcacggtcgcgctcaaagacggcagcacggtcgatatagccattggccgcgagccggatgagccgcagtttgtcatcaccgatctgctgccgcatctcggcaaggatcagatgcgcaagaccatggaagagggcatcacgggcgaggcgctcaacatcgtcatcggcagcatgccgtatgccggcgaggggcgcgaccgcgtgaagctcgccgtgctgtcgctgctctatgatgaatacggcatcacggaagaggacttcctgtcggcggagctggccgccgtgccggcgttcccggcgcgcgacatcggctttgaccgcagcatgatcggcgcctacggtcaggacgaccgcgtgtgcgcctatgccgagctgcgcgccatccttgacctcgacggcgcgccggagcgcacggccgtgtgcatcctcgccgacaaggaggagatcggctccgacggcgtgtccggcatgcagtcgcaggcgttcgaggccttcatggccgacctctgcgagcagcaggacgtcgcgctgcgccactgctttgccaggagcttttgcctctcggcggacgtctgcgcggcctttgaccccagcttccccgaggtgagcgccaagcgcacggaggccaagctcaattacggcatgggcatctgcaagttcacgggtgcacgcggcaagtccggcacgagcgatgcctcggccgagctcgtggcctatctgcgccgtctgtttgccgacaacggcgtcgtctggcagctgtccgagatgggcaaggtcgatcagggcggcggcggcacgatcgccaagttcatggccgaccggaatattgacaccattgacgccggcgtgccggtgctgagcatgcacgcaccgtttgagctcgtggcaaagttcgactgctggatgacgtaccgcggcgtgctggctgcctactgcgacacgcaggcgtgaccggatgcggcaggggaaaacggggacagtgaccgttttcccttgtgacgcaaagaaaaccgtggtataatcaacattcctatctgcgtattgggaggtgcatccgtgaccatctggaacgcgatcctgctcggtctggtgcagggcatcgcagagtttctgccgatctccagctccggccatctgtcgatcctgcaaaacctgtttcatatgtcgacggcggaaaacggccatttgtttttcgatgttctgctgcatttgggcacgctcatttccatctgcatcgtctactggcgggacatcgtggccatggtgcgcgagacgattgcgtttttccgcagcgcacggctgccggccgagcagcgccggcagcagcttcccgccgcgcgcatggtgctcatgatcatcctggcgacgctgccgctgtttttgatcctgccggtcaacgatctggtcgagcagctgtactaccacaccttcttcatcggcctcatgctcatcctcacgggctttctgctgttcgtggccgataaaatgcccaagggcacgcgcacggagaaaaccatgcgcgtgcgcgacgcgctggtcatcggcgtgtgtcaggccgtggcgacgatcccaggcctgtcccggtcgggcacgacgatcgcggccggcatggccacgggactggatcgcagctttgcggtgcgcttctcgtttctgatgtcgctgcccgcggtgctgggggcaaacatcctgtctctggccaaggcggccaaggcgggtatcgatgtgtcactcctgccggcgtatctggccggcatgctcgtggcgatggtctcgggcgtcgcggccatcggccttgtcaagcgcctgacgtcgaagggccgtttcggcgcgttttcctactactgttggggcgcgggcgcactgacgatgattctgtctctgattttctgagaggacgttatataacatggcaacttcatcatccaaaaagaaaaccggcacggcgaaaaaatccgccccggcagcaaaaaagccggccgccgcgccgaaaaagcagccggctgccaaggcggctccggcctccgcgccgacggcaccgacatggccgtatgcgctggcgtgcatcgtgctgtcgctgctggcgttcctgggcctgtttcatgccgagggcgtcgtgatcgacggctttgcgggcttcctgtgcggcatcatgggctggggcttttgggcgttcccgtttgcgatgctgctgctggcgtggacctttgtgcgcaacccgcgcgagcgctttggcctgcgcgtgacggcggcgctgctgatcgcgccgctgttcggcacgatcgtgcacctgatggtctgccgcgtggcgttcacggcgcagacgttcggcgcgatcgtcggccagctctatgacgggggcaaggtgctcacgtccggcggcgtgatctccggcggcattggctatctgctcaaggccggcatcagcgtctatgcggcgctgccgctgacgatggcggcgttcgtgttctgcgtgctgggcagcatggacctgacggtcggcaagatcgcggcctgggtgcgcacacggcgcgaggcacagtacatcccggacgaagacgtgccgcttgcggaggatgaggaggacgaaccggaaccgcagccgctgcccgagccgcggcgcagtgcgcgccgtgccgtgccggacaagccggtcgccaagaaaaaattcatcgacattccggtcgaggagaccatgacggagccggacgacgatccgatcgatccgatcccggtcaaaaagcctgcccgcggcgcgaaaaaggccgcgccggccgatgccacgcaaaatgtccagccgctgtccgtggaggaggcggccgatatctgcggcgtcaccccggtcacgcaggagatccaggacccgccgaagccgtccaaaaaggcggccagtgccgccgtcgcggcggagacggccgcgatcacctccgccatcgagagcgagaatgccgatcactcttcctatcagctcccgccggtgtcgttcctgcgcgcggggaagaaggatcagacggacgcgacggaggagatccgcttcaaccgcgaccggctcaacactgccctgagcagcttcggcgtcaatgcgaccatccgcgacgtgacgcgcggccccacggtcacgcgctacgatctcgagctcgaggcgggcgtgaagctcaacaagatcacgaacctctccggcgaccttgcgctcgcgctcggtgtggagaatgtgcgcatcgcgccgatcccggacaagatctcgaccgtcggcatcgaggtgccgaacaaggtcgtcagcgccgtttgcctgcgcgatatcatcgactcgcccgcgttccgcaatgcgaagtccaagctctcgtttgccgtcggcaaggacatcggcggcaactgcatcatcggcaacatcgccaagctgccgcatatgctcatcgccggcacgaccggctcgggcaagtccgtgtgcatgaactcgctcattctgagcctgctctataaggcgacgccggacgaggtgcgcctgatcatgatcgacccgaaaatggtcgagctcggcatctataacggcatcccgcacctgttcatccccgtcgtgaccgacccaaagaaggcggccggcgcgctgcagtgggcggtcgtggagatgctcaagcgctaccgcctcttctccgaggcgcaggtgcgcgacctcgccagctacaatgccctccagaaaaacgagcccgacgggcagacgctgccgcaggtcgttatcgtcatcgacgagctggccgacctcatgctctgcgccgccaaagaggtggaggagagcatctgccgcgtggcgcagatgggccgcgccgcgggcatgcaccttatcatcgcaacgcagcgcccgtccgcggatgtcatcaccggcctcatgaaggcgaacatcccgagccgcattgcctttgcggtctcgtcctcgctcgagagccgcatcatcctcgatacctccggcgcggaaaagctcatcggcatgggcgatatgctctatgcgcccatcggcaccggcaagcccctgcgtgtgcagggctcgtttgtgtcggacgaggagcgcgaggaggtcgtgcgcttcatcaagcaaaactccgaggcgcagtacagcgacgatatcatcgcgcagatcgagaaatccgccgccgaggccgacaagaagtccggccccgcgcccgaggcggacaagcccgccaagagcgactatgacgagctgctgccgcaggccgtggacgtcattctcgagacgaagcaggcgtcggtgtccatgctgcagcgccggctgaagctcggctattcgcgcgccgcgcgcatggtcgatcagatggaggagatgggcatcgtcggcccgtttgagggctcgaagccgcgcaagatcctcatcacgaagcagcagtggcaggagatgcagtatgtgcagggcaccgcaccgagcgaggtgctgcaggcgcagacggactttgccgatgacaacgaagaggaacctgaagacgatgaatcatgatctccacacggggcggccggagcgccgccccgtcggcacgattgcctttccggatggggcggactttgccccggaaatgacgccggcgcaggtcggcgcttacagcacgctcgccctcgcgcacatcggcgacggggtatatgagctcatgatgcgcacggccctgtgtgccgccgggctcacggccgtgaccgacctgcaccgtgagacggtgcgccgcgtcaacgcgcccgcgcaggcgcgcgtggcggaggccattcagcccgcgctcacggacgaggagcgcgcggtctacaagcgcggccgcaacgcgaaggtgaactcggtgccgcagcacgcggacgtcgcgcagtatcacgcggccacggggctcgagacgctctttggctggctgtatctgctcggccgcacgcagcggctgcgcgagctcttcagcaagatcacggaggtgctgtaacatgccaatggacgcagtttttctgcacggcctgacgcaggaactgacgcagagcctgaccggcgcgcgcatcgacaaggtgcagcagccggagcgcgacctgctgctgctgtccgtgcgcacgcagagcggcaacgcgaagctgctcgtgcacggcggcgtgggcagcgcgcgggtgcatttcacggccggcacgtttgaaaatccggccgaaccgccgatgttctgcatgcttctgcgcaagcatctggtcggcgcgcgcatcacgggtatttcccagccggacttcgagcgcatgctcgttctcgatctcgacgggcgcgatgagctcggcacgccggtcaaaaagcagctcattgttgaaatgcttggccgccagtcgaacgtcatcctcgtcagcgccgacgggcacatcatcgactgcatgcgccgcgtggattcctccatgagcgagacgcgccaggtgcagccgggcatgttttaccgcctgccgctgcggcaggacaagccggtcctgtttgacacgacgccggagcagcgcgcgcagctgctctccggcccggtcactgcggcgacgcttgataagtggctgctgggtctgttctccggcgtgtcgcccctgctgtgccgggaggtgtgcttccgcgcgctcggcgatgccagcccccggctcgagcggctggacgatgcgcagcgcgcgcgcctggagcacgagctggacgcgctggtgttctcggtcgagacgaacaatctcgtgcccaccatgctgctcgacggcgaccggccgaaggatttttccgccgtgccgatcctgcagtatcaggacgcgctggaatgccgcggctgcggctcgttttccgagctgctggacgaattttatctccgccgcgacaaggcggaggccatgcgccgccgctcgcaggagctgacgcatcaggtgcgcaccctgcgcgaccgcacggccaaaaagctggccatccagcagtcggacctgctgcgctgcgccgaccgcgaggccctgcggcagaaggccgacctcatcaaggccaacctctaccgtatccagaaaggtgaccgcaccgtgacggtgcaggactactacgccgagggctgcccggacgtgacgatcgagctggacccgcgcaagagcccgcaggagaacgccgccgcgctctataagtcctaccgcaaggccaaaacggccgaacagcacctgaccggcctgatcgcggaggcgagccggaacctcgactatctcaacagtgtgctcgatgagctcgcgcgcgccgagagcgagcgcgaccttgccgacatccgcgccgagctgcgcgcgaccgggtatctgcgccagccgcgcaatgccaaaaaggaaaagacggcgcagcgcgcgccgctcgccttcgtttcgagcaccgggtatgagatcctcgtcggccgctccaacacgcaaaatgacgagctgacgcaccgcaccgcccgccgcacggacatctggctgcatgtgcagaaggtacacggttcgcacgtcatcatccgcgcgcacgacacaacgccggacgatcagacgatcgccgaggcggcgagtctcgccgtatactattcgcaggcgcgcggcggcgggaagacaccggtggattacaccatggcgcgcttcgtgcgcaagccgtccggcgcgctgccgggcatggtgctctatacggactaccagacctgcatggccgagagcaatgaggcgctcgtggagcgcctgcgcgtgcgctaaggcagcaaaaaagctcccccggcgggggagctttttctgtttctcttgcggtatattgcagcaatttttcgcgtactggttggacggttgacggatgcggaaaactgcggtatgcttttggcggcaatgtgggttcaatccggcgttgccggagactttgacgagctatggagggagcaatgcgcagatcatggagctgcccgcccgggcagggcgcagcgatgcccagacgccgcggaggcatccggctgcggttcgatccgggcgttgacccggaggtgcggcgcgcccttatgcagtttgtgcgctggctgcagacgcagtacgcgttcactgtgcgcgtgccggtctatgtgcgggcggccgagcggcttttgtgccgggatggcgatctggcctgcgggacatttcttggccccagcgatccgaaacaggagccgtatatccgccttgctgtcggagattacccgcagatgcttgcagcgtggggacaggacagtgcgctggcatcgatcctgcgctcgctcgcgcacgagctgacgcattattttcaatgggtgcgcgatcccgtggggtatcagactgcggacgagtccagactggagcggcaggcggatcgctgcgcccgcgagaccttatacgattacgcggatgtgtatgcgcatccgtgaggtacacatatccttttagggcagaaaacggaggaatccttatgaaaaaactcattgcctattactcccgcgcgggagagaactatttttccgggacgcaccgcgccatcgccgtcggcaacacggagaaggcggcgcggctgctcgccgaactcaccggtgcggagctgttccacatcgagcagaaggtgccgtattcggacgactatgacacctgcgtcgccgaggcgcggcgcgacctgcgcgccaatgcccgtccggaactgacggcgctgccggagcgtctggacgactatgaagaaatctacctcggctatccgaactactgcggtaccatgccgatggcggtctacacctttcttgagcactatgactggcaggggaaaaccatccatccgttctgcacgaatgagggcagcggcctgtcgaacacggagcaggacatccagcgggcggcgaagggcgcgcgggtcgcgcgcggcctgtcgctgcgcggcagcgcggtcgagggcgcaaaaccgaaactggagcagtgggtgcgcggataacacgcgcgttctgaccggcagagaggaaggaggctgtgcatgagccgaaacgcaaagattctcatcgatttggccgtgctcgcggccgtttacggcatctggctgctgccgaagtggcggccgctggggaaaagaccgctgctcgtctatacgctcatgtacggctgcctcgccgggatcgtgcgctttacgctcatgccggtgctcacggcgctgccgttctgccttgaccatccgtatatccccatgcacatggcgccgtttgaggacgttatcctccgccacggcgattatgtccggcagatcgtgctgaacatcgccctgtttgtcccgttcggcgttttgctgccgctgtgccgcagctgccgcggcaggcggtgcagcttctggcgctgcctgctgctgacgctggcgctcagtgtcggcatcgaggtcgtgcagccgctgctgcacgcattccgcagttcggacattacggacgtcatcacgaacacgaccggaggcgtgctcggctatgcgctctgggcgatcgtgcacgcctgccggaaaaaacgtgaagattgacctgccttgagataccggtgcttttgccggtatcttttttgttgaaaatgtgccgctgtttcgttatactattacaaaaagcggaattttacggtcaaaaacggagaaaaaacaaaaatcggaggagagaacatggacgagcggatctatcgcgaatacgttgcgatcctgaaagaggagctgcagcctgccatgggctgtacagagccgatcgccgtggcgtactgcgcggcgctggcccacaggacgctcggcgcgctgccggaaacggtcgaggtgctcgcgagcgcgaacatcatcaaaaacgtcaagagcgtcattgtgccgaatacgaacggccagcgcggcattgcggcggccgcagcggcgggtatcgtttccggcaatgccgacgcgcagctgcaggtgcttgcgagcctcacgccggagcaggtggatgcggtgggcgcctatctgcagcaggctgcctttaccgtccggcgcgcggacaaggactacgtgttcgacattcaggtgcgcgtcacggcgggggcggacagcgcgtccgtcgagatcgcgggctatcacacgaacgtgatccgtatcgagaaaaacggcgtcgtgcagtttcacaaggactatcaggagtccggcagccagcacgccaccgaccgcagtctgctgacggtcgagcacatcatcgcctttgcaaacgaggtggacattgccgacgtgcaggagacgctccagcggcagatcgactataactgggccatcgccgaggagggcctgcgcggggattacggcgcgaacatcggccgcatcctgctgcagtcttacggcatgagcatccacaaccgcgccaaggcctacgccgcggccgggtcggacgcacgcatgaacggctgcgacctgccggtggtcatcaactccggcagcggcaaccaggggctgacggcatcactgccggtcatcgtctacgccagggaactgggcgttacgcagcagatgctctaccgcgcgctcgtggtgtcgaacctcgtcaccatccatctgaaaaccggcatcggcagcctgtccgcctactgcggcgctacggcggccggctgcggcgcggccgcgggcgtgacgtatctgtatggcgggcagttccgcgagatcgcgcacaccatcgtcaacgcgatcgccattgattccggcatgatctgcgacggtgcgaaggcgagctgcgcggccaagatcgcctcggcagtcgaggcgggtctgctgggtatgcagatgcagatgcacgagagccagttctacggcggcgacggcatcgtcgtcaagggcgtggagaacacgatccgcaacatcggcacacttgcgagcgagggcatgcgcgagaccgaccgcacgatcatccgcatgatgatccaggagcactgatccgccgaatattgccggctgccggttggcggccggcatttttgcgccgaattttcgcaccggcggagaatcggcattgcattttgcgcgccgagcgcgtataataccgcatatttcattttgcaaaagatttgcatacccaaggaggcgcgccatgcgtttatttgatattctcgggccggtcatggtcggcccgtccagcagccacacggccggggctgtgcgcatcggcctgacggcccgcaaactgctcggcgaccggccggtgcacgcggacatttcgctgcacggcagcttcgccctgaccggtcatggccacggcacggactgcgcgctgatcgcgggcctgctcggtatgcagccggacgatctgcgcattccgggcagctttgccgtcgcggcggagcaggggctgacgttctcgttccggaacgtgcagctgcgcaacgcgcacccgaacaccgcgcgcctgcagctcacgggcgccaagggccgcacgctggacatcgtggccgagagcatcggcggcgggcgcatccgcatctgctccatcgacggtatcgagacgaacttttccggtgagcacaacacgctcattgtccacaatcaggacacgcccggccatgtcgctgccgtgacggcggcgctcatgcagcggcacgtcaacatcgccaccatgcagctctaccgcagcgagcagggcggctacgcggtcatgatcctcgagtgtgaccagccgatcccgaaggatatcgagcagtggctgtcgcacatcgagggcattcagaagatcacgatctttaatcaggaggaaccggtatgagcttttcgagcattgcatccatgctttcggctgcacaggagagcgggcagccgctctatgccgtcatccgtgatgcggactgtcaggaaaacggctatgacgctgcggcgtcctaccgccagatcgcggcgctctggacggcgatgcagcagtcgagccggcagtactgcgcatccgaccgctccaacagcgggctcatcggcggcgacgcggccagattccgcgcggcggcggaggccggccgcctcctcggcgggacgtattttcagcgcgtgacggaagaggcgctcaaggtggccgagtgcaatgcgtgcatgaagcgcatcgtcgccgcgcccacggcgggcagctgcggcgtgctgccggcggtgctgatcccgttggcagaggagcgggacgtgccggaggagacgatcctgcaggcgctgtatatcgcggccgggttcggccaggtcacggcgctgcgcgcgagcgtggccggcgcggagggcggctgccaggcggagatcggcacggccagcgccatggcggcggctgcgctgacgcacatcctcggtggcacggcgcagcagtgcgcggatgcgtacgccatcgcgctcggcaatctgctcggcctggtgtgtgacccggtcgcgggcctggtcgaggtaccgtgtgtcaagcgcaatgtcatcggtgcggtcaatgccgtgagcgcggcgaatatggccgtcgccggcatcacgagccgcatcccggtcgatgaggtcatcgatgccatgggcgaggtcggtgatgcgctcccggccagcctgcgcgagaccggcctcggcggccttgccgctacgccgactggccggcaggcggccgagcggatcgcccgcgccgaacactgaatgcctccgtcccgcaggccgagccatcggcggcggggcggatttttgcgggaaaaggcttgacagacgggcaaaatcacggcaatgtatagttatcctatagaacgaacgacccgctctgcgggcggaaaggcggagccatggaattcaataaacccattgcggatatgctccccggcatggatgtcgagggcttttatattctgcgcgcggcggcgctcaagacgacgaacaacggcaaaccgtttctcagcggtacgatctgcgaccgcacgggcagcgtggagatcaagatctggaactacagcggcccgatcggcgcgcgcccggacgataccggccgcgtcgtaaagatccgcggcagcgtctcggaataccgcggtgcgctgcagatcagcgtccaccgcatccgtatggccgaagcggcggacgattatgacacggcgctgctcgtgccgacggcgcccatcgacgcggacgccgcgctggcggacgtgcagcggctggtcgcctcgatcacggacgcggattaccgcagcgtggccgagacgatgctggcgcggcacctcgatgcattccggcgcattccggccgggaagagcgtgcaccacagtttcctgtccggccttttgatgcatacttacaacatgctgcgcacggcggattttctcgcgggcctgtatccggaggtcattgaccgtagcctgctgctgaccggcacgctgctgcacgatttcggcaaggagcgggagtttgcgttttccgatctcggcatcgtgacggagtactccacggccgggcagctccttggccatctggtcatgggggcgcaggaggtcgcggacgccgcgcgcgagcttggcattcccgaggaaaagtccatgctgctgcagcacctgctgctctcgcaccacggcgagccggagttcggcgcggccgtgcggcccatgtgcgcggaggcggagctgctgtcatacattgacctcatcgacagccgcatggagatctatgcggaaacgctgccgaccgtgccggccggcagcttcagtgcccgcatttttgcgctggaaaagaaaatctatcaccacaactgaggaggctgcccatgctgaccctgccgtcacaagtgcatacggcgctcgatcgtctcacggcggcgggctgggaggcctatgtcgtcggtggggctgtgcgcgacgcgctgcgtggctgcgcggcgggggattgggacatcacgaccaatgccgagcccgcgcaggtcgagcgcgtctttgccggcgagcggctcatcgagacagggctcaggcacggcaccgtgaccgtcctgctcgacggcctgccgcttgagatcacgacctaccgcgtcgacggggactataccgaccaccggcggccggacgccgtgcgctttacgcgcagcctgcgcgaggatctgctgcgccgcgatttcacgatgaacgcgctggcctacaatccgcgcacggggctggtcgacgtctgcggcggggcggaggacattgcgcgcggcgttgtgcgctgcgtgggcgagccggaccgccgctttcaggaggatgggctgcgcatcctgcgcgcgctgcgctttgcgtccgtgctcggctttcagatcgcgccggagacggcggcggccatccatcgcaatcgcgcgctgctgcagtatctcgcggcggagcgcgtgcgcagcgagctgacaaagctcctctgcgggcagaacgtggacgcagtgctgcgggaattttccgatgtgctggccgtcccgatcccggagctgcggccgatgttcggctttgcgcagcacaacccgcaccatgaccgggacgcctggctgcacacggccgcggtcgtggagcacatcccgccggagccggtgctgcgctgggcggcgctgctgcacgatgtcggcaagccgccgtgcttttccctcgggccggatggtgtcggccatttttacggccacgcggccaagagcaccgagctggcggagggcattctcacgcgcctgcgctttgacacggccgggcgcacgcgcatcatgcagctcatccgctatcacgacctgcccatcgcgccggaggcaaagcccatccggcggctgatgaacaagctcggcgttgagaccgtgcggcagctttttgagctgcacattgccgatacctgcggccagtcggccatctgtgccggccgggtggagacgtaccggcaggcggagcgcgtgctcgacgagctgctcgcggcggatgcctgcttctcgctcaaagacctcgcggtcaacggggatgatctgctcgcgctcggcctgcgcggccgggcggtcggcgcggcgctgcaggcgtgtctggacgcggtcatggatgagacgctgccgaacgacagggccgcgctgctggggtatgcggcggaaaatttgcagcgctttgcaaattcctgaaactcgggacttgaaaattgtggagcgatgttataagatgaagaacatatttgaattacattgtaatggaatatgcggagaacaggtttatggagcagattcggtcgcggaaaaatcaatatatcctgcacctgcgcgcgctggccagggataaggatgtgcgccgggacgcgggggagtacgtctgcgacggtgaaaagctgctgcgcgaggcgctgcagttcggcgcggaggtcacgtccgtgctctggcgcgatgcggcggcgttcccgctgccggacggcgctgcgcagtatacggccgacgcggagctcgtcgcctatgcctcgccgctcatgcattcgcccggcccggtctttaccgtgcgcctcccggagatgcgcctgccgcagccgctgcggcacgtcatcgtgctcgagggcgtgcaggatcccggcaacgtcggaacggtcatccgcacggcgaacgcccttggcatggatgccgtggtgctcaccggcgcgtgcgccgatctctacagccccaagaccgtgcgcgctgcgatgggcgcgctcttccgccagccggtgctgacgtgcacgacggacgagctgctgcagctgctgcatgcccgcgggctgaagctctacggcgcggcgctgacggatgcggcgcaggatctgcggtgcgtgccgctctcgccggccgccgtggcgatcggcagcgaggggcgcggcctgagcgcgcagctgctcgcacagtgcgacgggcagatcatcatccccatgcagccgggggcggagtcgctcaatgcggcggtggccgcggcggtcgtcatgtgggagatcgcccgcaccgggatgtgaggaggcgcgcaaatgtcgcagctgcaatactgggtttggctgtccatgcgctttggcgtgcgcccgaagatgaagctcgcgctcgtggagcatttcggcacgccgcgggatgtatattttgccacggaggcggattaccgtgtccgtgtgccgctgcgcccggaggagctccgtctgctgctggataaagacatgaaggatgccaaccgcgcgctcgccatctgtgaccgggagcatatccgcatcctgacgatccaggacgccgcctatccgcagcgcctgctgcagatctacgacccgccgctcgtgctctacgtgcgcggcacgctgccgcagctcgacgaccgcgcggccgtcgccgtggtcggcacgcgcagcgcaacgccgtatggcgtgcgcaccgcgcgcaagttcggcttcgagatcgtgcggcacggtggtatcgtgctctccggcctcaccgccgggatcgaccgctcggccgccgagggcgcgctgcacgccggcggcatttgcgtgggcgtgtccggtacggcgatcaacctggattttgcgggtgcatacacgcaggaggtcgcgcgctgcggcgccgttgtgagcgagtttgcgccgaatatgtccgtgccgcgctttggcttccggctgcgcaaccgcatcacgtccggtctcgcggtggcgacggtcgtggtcgaagcaccggagaaaagcggcgcgctcctgtttgccgacgatgccgtcacgcagggcagggaggtctttgccgtgcccggcaacgcggactcccgcgcctcggccggcagcaatgcgctgctcaaggacggcgcccgtccggccacgtgcgcgtgggatgtgctgagcgattttcgccgcatgtttcccggcacgctgcgggaaaatatcgcgcccgcgcccgagacccaggcgcctgaaccgccgccggagatgggcagcggctttgcacaggtgcgccgcccggtcgcggagaaaaggattgacaagccgcagtcggaggcatatattgacctggaagcgcagctgaagtcgctcacgaccgagcagctgcagatcgtcgcggcgatcgatgcgcccggcacacaggtggacctcatcatcgaaaagacgcagctgccggcgagtaaggtgctcgcggagctgaccgtgctgcagatccgcggcgtcgtccggcaggagccgggcaaacgcttttcattaaatatacgcgcaggcactgcgcagaatcataaggagttggagtagacccgatggcaaaagcaaaaaccgatctggtgatcgtcgagtctccggcgaaggccagaacaatcgaaaaatatctgggcaatcattatcaggtcgtggcctcgatgggccacctgcgtgacctgcccaagagcaccatgggtgtggacattgacggtgattttacgccgcagtacctgcccgtgaaagaccgcgcggacgtgatcgccgacctgaaaaagcgcgcgaaatcggccgacaccgtctatcttgcgaccgacccggaccgcgaaggagaggccatttcatggcacctgaaggagttgctggatctgccggatgacaaggccaagcgcgtgacgttcaacgagatcacgaaaaaggtcgtcaccgagagcatccagcacccgcgcgagatcgatcaggatctggtcgacgcgcagcaggcacgccgtattctcgaccgcatcgtgggctataagctcagtccgctgctctggcgcaaggtcaagcccggcctgtccgccggccgcgtgcagtcggtggccacgcgcatcgtggtcgaccgcgaaaacgagatccgcgccttccagccgcaggagtactggctgctcgacgcgctgctcgactgcggcgcgggcacgttcacggcgcgcttttacggcacggccgataagaaaatggatgtcccggacgaggccacggccgacaagatcattgccgccgtgtcggccgaaccgttcaaaattgcgagcgtcaagcgcggcgaaaagcagcgcagcccgtcgcccccgttcatcacctcgaccctgcagcaggaggcttcccgtcgcctgggcatgacgccgcggcgcaccatgtcggtcgcgcagcagctctatgagggcgtggacattaccgaccgcggcacgatcggcctcatcacctatatgcgtaccgattcgcagcgcctgtccgatgaggcgctcgccgccgcgcagtccttcatcgtcgagcattacggcccggagtaccaccccggtaagccgcgcacgtataagaccaaggccggcgcacaggacgcgcacgaggccatccgcccgacggacgtcacgctcacgccggatcgcgtgcgccacgaccttacgccggagcagtaccggctctaccggctcatctggggccgcttcacggcctgccagatgtccaacgccgtgtacgacaacgtcgtcgtggatgccggcagcgcgggctatctcttccgcgccaactactccgagcagaagttcgcgggctacaccgccgtgtatgaagaggcgaaggacgaggagacgagtgaagtgcgccgtccgctgccgtcgctcaagcagggcgatgccgtggagcttaaaaacgtcacgaaggagcagcagttcacgcagccgcccgcccgctacacggaggcgacgctcatccgcgccatggaggaaaagggcatcggccgtccgtccacgtacgcgccgacgatctcgaccatcctcagccgcaactatgttgtcaaggaggggcgctacctgcgcccgacgaatctcggcatcgtcgtgaccgagatgatggaggagtacttccgcaacatcgtcgatctgaagttcaccgccaacatggagacggaccttgacaagatcgaggccggcaagatggcgtggaaggacgtgctgcgcgagtattataaagactttgacgcgaacctcaacaacgccgagatccagctcgagggcaagcatctcaaggtgccggatgaggagtcggacgaggtctgcccgaactgcgggcgcaagctcgtgtataaaaacggccgcttcggccgcttccttgcctgcccaggctacccggagtgcagctttacgatgcccatcgtcgtcgagatgcccggcaagtgcccggcctgcggcggccgtctgctcaagcgcacgtcccgcaagggctttgcctactacgcttgtgagcgcgggcatgattgcccgggacatggcgagggtgagggcggcgagagcatccagggcttcatgacctgggacgtgccgacgaaggactattgccccgagtgcggcaagaccatgttcaaacgcgccggcaagggcgcgaacaagccgttttgcatcaaccccgagtgcccgaattatctgccgcccgacaagcgcggctacaagcgcaagccgaaaccggcggacgacgcggctgagcccaaggctgagtcggagtccaaggagacgaagccggagaccaagaagccggcggcaaaaaagtccgctgcaaagaaaaccgctgccaaaaagcccgctgcaaagaaaacggccgccaaaaaaccggcagccaaaaagacgacgaaacccaagaaggaagtataattggaaaggcggcctgaccggccgcctttttcgaggaggaacgctatgaccccagtgaccgtgatcggtgcgggcctggcgggatgcgagtgcgcgtggcagctggccgggcgcggcatcccggtgcgcctgatcgagatgaaacccaagaaaatgacccccgcgcacgtatccgaaaactttgccgagctcgtctgctccaactccctgcgcagcgatgagctcacgaacgccgtcggcctgctcaaggaggagctgcgccggctcgactccgtcgtgcttgcgagcgcggatcacaaccgcgtcgccgccggcggcgcgctcgccgtggaccgcgaggcgttcgcgcgcgagatcacggagcgcatctgcgcgcatccgaacatcaccgtcgagcgcgccgaggccgacgccatcccggacggtgaggtcgtcattgcgaccggcccgctcacgagcgatgccatggcggccgagatccagcgcctctgcccggagttcgacctgcatttttacgatgccgttgcccccatcgtcacgctcgagagcgtggacatggacagcgccttttttgccagccgctacgacaagggcacggccgactacgtcaactgtcccatggatcaggcggagtataccgctttcgtgcaggagctgcgcagcgcaaaggaagcgcccatccacggctttgacgacggtgcagtctttgagggctgcatgccggtcgaggtcatggcccgccgcggggaggacacgctgcgctacggcccgctcaagccggtcggcctgcgcgacccgcgcaccgggcgcgacaactatgccgtcgtgcagctccggcgcgacaacgccgggggcacgctgtataacattgtcggcttccagacgcacctgacgtttggcgagcaaaagcgcgtcttttccatgatcccggcgctgcggaatgcggagttcgtccgctacggcgtcatgcaccgcaacacctatttaaattccccgcagctgctcgaccggtattatcgtctccggcgcgacccgcgcatccgcttcgccgggcagatgaccggcgtcgagggttatgtggagtcgtgtgcgtccggcgcgctcgtcggcatcgagacggccgcgcagctgctcggcctgccgcctgtcgatttcccgcaagagacggccatcggcgcactgtcgctgtacatttccggcggcagcgtcggcgattttcaacccatgaacatcaattttggcatcatcacaccgctggatcaccgcgtgcgcggcaagcgcaataagaacgcggagatctcggcgcgcagcctgcagatcctggacgggctgaaacaaaaggaggtttttcatctatgagaattcttgtggacgcaatgggcggtgacctcgctccggacgagatcgtcaagggcgcggtgcacgcgcagcaggagctgggcgcggagatcgtgctcgtcggccagcgcgccgccattgaggcctgcctgcgcaatgagcaggccaagctcgagatcatcgacgcgagcgaagtcatcaccatggacgacgaccccagcacagccacccgccgcaagaaggacgcttccatgacggtcgcgctcaatatgctgcgcgacggcaagggcgacgcggtcgtctctgccggcagcaccggcgcgctgctcaccggcgctacgctcatcgtcaagcgcatccacggtatccgccgcgcggcgctggcccccgtgctgccgaacggcgacgcgggcgtcatgctcatcgactgcggtgccaacgccgactgcacgccggagtacctgctgcagtttgcctatatgggcagctattatgcccgcaccgtgctcggcatcgccgcgccgcgcgtcggcctgctcagcaacggcaccgaggatcacaagggctctgagctccagcacgagacgttcccgctgctcaaggcggcggacgccgccggccgcatccgctttatcggcaacgttgaggcgtcgcaggtgttcagcggcgatgtggacgtcgtcgtcacggacggctttaccggcaacgtactgctcaagggcatcgagggcagcatcaagtacatgacgcgccagctcaagggcattttcatgaaaaacttcaagaccaagatggctgcccttgccatcagggacgagttccacgcgctcaaggcatcgcttgacccgaacgaggtcggcggcacggccatgctcggcatcagcaagccggtcatcaaggcccacggctcgtctgatgcgcgcgcgatctacaacgccatccgtcaggcgatcgcctttgtcgattccggcatcattgacgacatcacggccaatatctcctacatgcgtgtggacaagcacgcggcgaaggagagcgactgatggaggcgctggaggcccgcctgggctacacgttccgtgaccgggcgctgctggagaatgcgctcatgcacagctcctatgccaatgaaaaccgcgcgcggggctataccagcaacgagcggctcgagtttctaggcgattccgtgctcggtatggtcacggcgacgcggctctatgcgctctatcccgacatgccggaggggaagatgagccgcctgcgtgccgagctcgtctgcgagcaggcgctgcacggcgtggcgctcacgctgcatctgggcgactatatccgcctcggccacggggaggagcgcagcggcggcagagagcggccgtccattctcgccgacgcggtggaggcggtcatcgccgccatgtatcttgacggcgggctggagcccgcgcagcgctttatcctcgcgcacatcctcaacggtctggccgagggggagatccaccacgtcgaggactataagaccgagctgcaggagcgcgtgcagcgccgcgccgggcagacgctttcctataccgtctgcgccgagagcggtccggaccataacaagacattcaccatggccgtgctgctcaacggcagcgagatcggccgcggcaccggccgcacgaaaaaggaggcggagcagtccgccgcccggtgcgcgctcgaacagatgccgcaataacggcatgcagccgcctgcgaaaacgcaggcggctgcattttttcacatctgaaaaaatgcgctccggccgttgcaaaatggcatttttggcggtatactctactttgtattactttgatttgagatatcagcggcgtctctgcacgcgcagacgccggatatgcgagggattttgtgtacttaaaagcattggagatccagggcttcaagtccttcccggacaagacgcgcctgaattttgaccaggagatcacggcgattgtcggcccgaacgggagcggcaagtcgaacatatcggacgccatcctgtgggtcatgggcgagcagcgcacgaaaacgctgcgcggcggcaagatggaggatgtcatcttcggcggcacggaaaagcgcagccccatgggctttgcgcaggtgtcgctcatccttgacaacagcaccggcatcttcgacaccgagaacaccgaggtcatgatcacccgccgctattaccgcagcggcgagagcgaatattatatcaaccgcgaggcctgccgcctgcgcgatatcaacgagctgctcatggacaccggtctcggccgcgacgggtactcgatcatcgggcagggtcgcatcgccgagatcgtttccggcaagagcaacgagcgccgcgagatctttgaggaagcggccggcatctcgcgctaccgctaccgcaaggaggagtcggagcgcaagctcgcccgcacggaggaaaacctcctgcgcatcaacgacaaggtcgatgagctggagctgcaggttgagcccctgcgcaagcaggccgagacggcgaagaagtatctccgattgcgcgacgagctcaagagcgcggaggtttccgtctggatggagacgctcgaccggctgcacgcgcaggctgagaccgtgaaccgcgattatcagaccgcgaaggaaaacctcgccggcgcgcagcgtgagctcgagcagctctatgcagcgtcggagaacatcgcgcagaagatgcgcgagaaggatctggagtccgagcgcacacgcgagcagatctccgaggccgagagcgccgctgccgagtgcgagagcgccgcggccgtcgtgcgcacgaacctgcaaaacagtgccgacagcatcgcgcgcctgcgcgtggaggtatccgagcagactgaccgtgcggacgctctgcaggcacagatcgacgcgcagcagcgccgcctgcaggagatcgaggccgaaaaggcgcagcacgcgcaggagatacaatccgtgctcgccgagatcgaccgcaacgcggcctcctccggcgaggccgagcgcgcgtacacggagctgctcgccaaagagagcgcgcagagcagcgcgctggccgagtgccgcacgcgcatcacgctcctggcggataaatcgcaggagctgctcgatcaggaaaacgccgtcgccaccgccgccgcggaagcggccgagcatctggcggcgcttgagacgcagcagcaggaaaagcagacagcgcagcagcaggcgcgcaccgcgtgcgacgccctgcgcgcggagcaaagggaaaaggcccagcgcctttccgcctgtgagcaggcgctcacccgacagcaggagcggctgtccggtctgacggttgacctgcgcagcaccgagtcgcgcatccgtatgctcacggagatggaaaaggacttcgagggctacaaccgcgcggtcaaggccgtcatgcacgcggccgaaaaggggacgctgcgcggcgtgcgcggcccggtcgcaaacctcatcaagactggcgaccgctacgccctcgccatcgagacggcgctcggcgccgcggcgcagaacatcgtcgtcgatacgcaaagctgcggcgcgcaggccattgagctgctgcgccggcgcgagaccggccgcgcgacgttcctgccgctcgataccatccgtccgatgcacttaaacagcgtgccggatcaggagccgggctatgtcggcgtggccgatacgcttgtcacctgcgccgccgcttaccgcaatatcgtcagcaatctcctcggccgcaccgtcgtggccgagacgatgaaagatgccatcgccatctccaggcgctatgaccaccgctaccgcatcgtcacgctcgacgggcagctcgtcaacgcgggcggctcgctcaccggcggcagcgccgccaagggcagcggcatcctttcccgcgcaaacgagctcaagcgcctgcgcgcggcgctcgacacgctcacgctggagaaaaagcagtgcgaggccgagcttgaggacgcgcagacggcgctcgacgcggcccatgcgcagctcgacaccgtgcaggcgcagctggagcaggcggtcgagacgctgcacaaggcggagtccgaagccgcgcaggtcgcgctgctgaaaaacgccgcgcaggagaccattgcggggcagaatgcgtccatcgacgcctgccgcgcgcagcagaaggcgaatcaggatcgcatcgcggccgcccgcgccgacgcgctttcggcggagcaggcgctcgccgcgcttcgcgcagagcgcgaccggagcgagctgggccgcggcgcgtttgaccgccgccgtcaggaactggccgatcagctggccggcctgcgggcggagtcggcgtctctggacgccgagcgcgagaccatcacgcgcacgacgcaacagatccacgacctctttgaggaaatgaccggcgaccgcacggcccgccttgcccagatcgagcaggccgaggccggcacgcagcagctgcaacagaccctgcagatgcatgagcgccgcctggccgaactgcgccagcgcgccgaaacgctgcgcagcgacctcgccgcgtgcagcagccgcaagctggagctcgagggccagcgcacccgcaccgaccgcgacgcgcaggcacgcaaccgcgacctgctggatatgcaggggcttgtgtcgcgcttcgagcagaagaagctctcggccgacatggaggaaaagcagatcctcgataaactctgggacaattatgagctcagccgcacggcggccgaggcgctgcgtcagccgatcgagaacatgacgaaggccaaccggcagatcgccgagctgcggcgcaatatcggagcactgggcacgccgaacctcggcgcgatcgacgaattcacgcgcgtgaacacgcgctacaccttccttaccggccagcgggacgacatcctcaaggccaagcgcgagctgaccggcatcatcgccgacgtgacgggggagatggagggcatcttcaccacgcagtttcaggcgatcgaccaggcgttccgccagacatttctggagctgttcggcggcggcaaggccgcgctcgtgcttgaagacccggagcacgtgctcgacagcggtattgagatcaaggtgcagccgcccggcaaggcgctctcgacgctgagcctcatgtccggcggcgagatggcgtttgtggccatcgcactctattttgccattttgaaggtgcggccgacgccgttttgcgtcatggacgagatcgaggctgcgctcgacgaggcaaatgtcacgcgctatgtgcagtacatgcgccgcctcgccaagaacacgcagtttctcgtcattacgcaccgccgcggcaccatggaggaggccgaccatctgttcggcgtgaccatgcaggaaaaaggcgtgtcccgcgtcatcgagctttcgctggatgaagcggctaaaaccatatcgtaacggagaagatagttctatgggattttttgataagatcaaacagggcctgaccaagaccaagacgaagatggacgcccagctgaccggcatttttgccgcctatgagccgggggacgaggaatttttcgaggaccttgaggagacgctcatcctcgccgacaccggcgtggagacgacgaccaaggccatcgcgcagctgcgcaaggccatcgagctcaagaagctgcgcaccggcgcggaggtgaaaaaggagttcgtgcagatcctcacgcgcatcctcaaagtgcaggacaccatgctcttgctcacgacgcagccgtcggtcgtgctcgtcgtcggtgttaacggcgtcggcaagacgacgacgatcggcaagcttgccgcccagctcaagaaagaaggcaaccgcgttctgctctcggcggcggacacgttccgcgccgcggcggccgaccagctcaccgtctgggcgcagcgcgcgggcgtggacatcgtcaaacacgaggagggatccgatcccgccgccgtggtgttcgactccattcaggcggcgaaggcccgcggcacggacgttgtcatcatcgacaccgccggccgcctgcacaacaaaacaaacctcatgaacgagctcaataagatcacccgcgtcatccgccgcgagctgccggaggccgatatcgaaacgctcatggtgctcgatgccacgaccggccagaacggcctcatccaggccaagcagtttctcgacacggccgacctcaccggcatcgtgctcacaaagctcgacggtacggctaagggcggcatcgtctttgccatcgcaaacgacctgcagctgccggtgaaatatgtcggcgttggcgagcagatcgacgatctgctcgagttcaagcccgcggaatttgtggaggcgctgctgtcatgatccttgcaagcaacaacgcacataagctcgaggagtttcgcgccatctttgcggacatgggcatcgagatcatcccgcagagcgcggccggctgccactttgaggtggacgagacgggggagaccttcgaggaaaacgcctacctgaaggccatcgccgtgacccgcgcgacggggcagcccgccgtcgcggacgattccggccttatggtcgatgcgctcggcggcgcgcccggcgtgcactcggcccgctataccggccggcacgaggattcggacgccgcgcgctacacgctcctgctccataacctcggcgaccgcaccgaccgcacggcccggttcgtgtcgtgcatctgctgcacgttcccgaacggcgacgtcctgcgcgcccgcggcacgtgcgagggcagcatcctgtttgcgccgcgcggggaaaacggcttcggctatgaccccgtgtttcagccggacggctatgcctgctccatggcggagctgcgcccggaagagaaaaacgccatttcccaccgcgggaatgcgctcaaaatcctgaaagaagaattgaggaactactatgctgacaagtaaacagcgcgcccagctgcgcggtcttgccgcgacggaggacaccatcgtccacatcggcaagggcggcatcacggacaacatcatcacccagatgagcgacgcgctcaaggcgcgcgagctcgtcaagggccgcgtgcttgaaaactcgctcctgtccgcgcgcgaggcgtgcgaccggctcgccgaggtctgccgcgcagaacccgtgcaggtcatcggatcgaagtttgtgctctataagcgcaacgagcagaagccgaagatcgagctcgtgaaaaaggcacgcaaatgaagatctgcatctatggcggcagcttcaacccgccgcatctgggacatacggccgcgctgcgcgcggtgcgcacggccatccggccggatctgacgctcgtcattccggatcgcatcccgccgcacaaggagctcacggcgggcagcccggagccggcggagcgcctgctcatgacgatgatggccttcgcaggcgagccgggcgtggaggtctctgacatggagctgcaccgctccggcaagagctacacggccgacaccgtgcgcgagctgagcgcgtgcaatccggacgcggagctgtatctcgtcatcggcacggatatgctcacgacgtttgagcagtggcacgattttcggtatctgctcgctcaggtgacgctcgtcgcgctcgcccgcacgggcgatgagcatgcggaggtcgagcgcttcagcgcctacctgcgcgggacgtatgacgcgcgcgtcatcgccctgccggccgagccggtcccggtcacgagcacggccgttcgtgcgctgctgccgcagcggcggggcagcgagtacctcgcgccgaatgtgtatgcgcacatcatccagcagcggctctacggcgcaaagcccgatctcaactggctgcgcgagcaggcttaccccatgctcaagccgcggcgtatctcccatgtctggggctgcgagcacgaggcgcgccacctcgccgagcgctggggctgcgatccggatgctgccgctgaggccggaattttgcacgattgcacgaaaaaattagagctatctgaccaattgctattgtctgataaatatggtatcataaacgatacggtcgaaacggccaacaccaagctcctgcacgccaaaaccggcgctgccgtggccagggatcgtttcggcgtaccacttgagatagaaaatgccatccgctggcacacgaccggcaagcccgatatgaccacgctcgaaaaggtcctgtatatggccgactatatcgagccgtcgcgggattttgacggcgtggacgagctgcggcggctcgcttacaccgatctggatgcggccatggtgctcgggctgaagatgagcctggaggatctgaaggccggcggcatcacgccgcacgagaacacggtgcaggcattaaactggtatcagggcagggaaaaagaatatgaaaagacgacagagtgacgatcgctatccgggcgattacggcggatatgacgatcagggttacgaccgttacgacggcggctatgacgattcctacgacgacggcagcggctttcaggacgacccgttttccgaggcatctgcggcggtgaaccaccgcgtgcaggcgcagcagtcgcaggcaaagcgcaagaaaaagaaaaaagtgcgcatcacggtcatcgtggtcgtggtgctggcgctcctcatcggcgagtttgcgatcctgatgaaccactgggtcagcccgccgagcctgagcgacggcgattcggacgatgtgagcgtcagcacagacggccgcaagaaagggtgctacacgttcctcatcgccggcaaggaccgcgcggccggcctgacggacaccgtacttgtcggtatgctcgacacggagaatcagtctctgaagtttgtcagcatcccgcgcgatacggccgtgaacgtgtcctacaagcccaagaagatgaaccagtactatgccgcggccgaaaacaacggcagggacggcgtggaggcgctcatcggcggcgcggagcagattctcggctaccgggtcgacagttatgcgctctttgacgtggaggtgttcgtcgagctcattgacgccatgggcggcattgattttgacgtcccggtcgatatggactatgacgaccccggtcaggatctgagcatccatgtccagaagggctatcagcacctcaacggctatcagaccatgggcgtgttccgcttccgcaacacgtatgccaacggcgatatcggccgcatcgacgtgcagcaccagttgcttaaggccatgacgagccagtttttgaagctgcacaacatcccaaatctcaacaaactcattgacatctatgaaaaggatgtcaccacaaacctgtcggcaggcaatgtgatgttctatgtcaaggagtttttgaagctcgatgagagcgccatctcgtttgagacgattcccgccaattacagtggcaccaaaaacggtatgtcctacgtgttcatccacgtggacgagtggctggattatctcaacacctggctcaacccctatacgaaggagatcacgtccgcggatgtggacattctctatgaatccaatgggcaggtcgtggccacttccggcacggttcagggcccaaacaaatggtaacaaaaaggaaggatgtagcattatgatgcctgctaacgagcttgctgcggtcatcgtcaaggcgctggacgcaaaaaagggcgagaacattcagctgctcaaaacccaggacctgacgacgctggcagactattttgtcatctgcacggccagctcctcgacgcacgtgaagaccctgaccgacgccgtggaagcggcggcggacgacgtgggcgaacccgtcctgcgccgggagggacaccgcagcggcagctgggtcctgctcgactatggctgtgtgatcgtgcacgtgttccaggacgaggcccgcaagttttacgatctggagcggctctggagcgacgcggaggtcgtggacatttccgatatgcgcgcctgagcgccaaaacaaaaccaaccggggcggatgcttgttccgccccgtgacctacttatgattttttgatttttcagagagaagtgaatgctatgaagtacgatttccaggcgatcgagaaaaaatggcaggcgcgctgggaggaagaaaagcccttcgcggccgtcaccggcgacccgcggccgaagttttacggcctgatcgagttcccgtacccctccggccagggcctgcacgtcggccacccgcgcccgttcacggcgatggatatcatctgccgcaagcgccggatgcagggctacaacgttctgttcccgatcggctttgacgccttcggcctgccgaccgagaactacgccatcaagaaccatatccacccggccgtcgtgacgaaaaacaacattgccaacttcaccaagcagctcaaaatgctcggctacagctttgactgggaccgtgcggtcgatacgaccgatccgagctactataagtggacgcagtggatcttcctgcagatgtataagcacggtctggcctataagaccaccatgcccgtcaactggtgcacgagctgcaagtgcgtgctggcgaatgaagaggtcgtcaacggtgtctgcgagcgctgcggcagcgaggtcgtgcgcaaggagaagagccagtggatgctcgccatcacgaagtatgcccagcgcctgatcgacgatctggacgatgtggattacatcgagcgcgtcaagacccagcagcgcaactggatcggccgctccaccggcgcggagatcacgttcaagaccaatgtcggcgacgatatcaccgtctacaccacccgtgccgatacgctcttcggcacgacgtacatggtcatttcgccggagcatccgctgctcaagcagtggcagccgcacattgccaactgggacgccgtggccgcctatcaggaagaggctgcgcacaagtccgattttgagcgcggcgagctcaacaaggaaaagaccggcgtccgtctcgagggcatcgaggtcatgaaccccgtgacgcataaggcgctgcccatgttcgtctcggactacgtcctcatgggctacggcaccggcatcgtcatgggcgttccgggccacgaccagcgcgactgggagtttgccacgaagttcggcctgccgatcgtcgaggttgtcgccggcggcgacgtgacgaaggaagccttcgttgccaaggacgacagcgccgtcatggtcaactccggcttcctcaacggcatgaccgttaaagaagccatccccgccatgaagaagtacgtcgtggagcagggcttcggcaaggaaaaggtcaactacaagctgcgcgactgggtcttcagccgccagcgttactggggcgagccgatcccgctcgtcaactgcccgaagtgcggctgggtgccgatcccggaggatcagctcccgctcgtgctcccgcaggtggacagctatgagccaaccgacgacggcgagagtccgctcagcaagatgaccgactgggtcaacaccacctgcccgcagtgcggcggccctgccaagcgcgagaccgacaccatgccgcagtgggccggctcgagctggtatttcctgcgctacatggatccgcacaatgacaaagcgctcgcttccaaagaggcgctggactactggagtcccgtcgactggtacaacggcggcatggagcacaccacgctccacctgctctacagccgtttctggcacaagttcctgtatgatatcggcgtcgtgccgaccaaggagccgtatcagaagcgcacgagccatggcatgatcctcggcgagggcggcgaaaaaatgtccaagtctcgcggcaacgtcgtcaatcccaacgacatcgtcgatcagtacggcgcggacaccatgcgcctgcacatcatgttcatcggcgattttgagaaggccgtcacctggtccaacgaggccgtcaagggctcgaagcgcttcctcgaccgtgtctggaatctggccgagagctgcacggacgatccggccatctcggacaagaacgaggcgatcatccacaagaccatcaagaaggtcacggaggatatcgacgaactgaagatgaacaccgccatcgcgtccatgatgaccatggtcaacgagtttgccgccaacggctgcacgaagggcgacatggagcagctgctgctcctgctcagcccgtttgcgccgcacatcgtcgaggagctctgggagcggctcggctttgccgccaagtacggcaagatgtgctgccagtgcgactggccgacgtatgacgagaccaagacggttgacacgactgttaccatggccgtgcaggtgctcggcaagctcaagggcaccgtcaccgtcgccaaggacagcgaccagcagaccgtcgtcgacgcggcgctgcagctcgacaaggtccagcgtcagatggagggcatgcagatcgtcaaagtcatccacgtcccgaacaagctcgtcaacctgattttgaagccgaaggcataacttcatcttgacatcggcggtaattgcaattataatattaacgctaaagccatgcatgatggcccttgaagcgccgcaaggcgtatttggagggagggaataaaatgtctgaaatctacgtcaaggagaacgagtctctggacaacgcgctcaagagatttaagcgcagctgtgccaaggccggcgtcatgtctgatctgcgccgcaaggagtactaccagagccccagcgttcgtcgccgcaaaaagtcggaggctgctcgcaagaacaagaataagcgttactactaatgcaaacaaaaaatcctgcatcttcggatgcaggatttttttcttgctttttcaggtctgcggttcgtacaccggcaggtccacatacgtcggtgcgtgcgccagcgccgggatcagcacgtcgatggcgtccgccatgcgcagcttgagcgttgacgtgttgatgcacgggtggcagcagaggtacgcatcctgcagcaggtcgcggtcgatgagcaggcgcacgcgcccgtcatggtcgttcatcagccccagcacgctcacagagccgggcgcgatgtccagcagctcgagcatatgctccggggaggcaaacgacagccgcgcgctgccgatctggtgcgagagatccttcgtgcgaaacggcttgtgccccggcatcagcagcagataaaatgccgtctgctgccggttcgtgaggaaaagattcttgcagatcccggcgccgagcacctgctccacggcggcgcaggcttcgatcgtgtcggcagcgtcgtgatcggcccggtcgtaggcgagccccaggcggtcgagcaggtcgtagcagcgcagctccttgtccagccgctgcccactcactgggcggccgtgatataaattctggtcaacatacatagcggtaactccttaaaaatcggtctgccgccattatagcggctttggcgtgcgggttcaagtcccgcacgtccggttgacaggtcgggttgaaacgggtacaatatatgctgtgaaactgtgcagaaaggaacgtcccatggcatatcagctcatcgccgtcgatatggacggcacattgctcaattcccaaaaagagatcacaccgcgcacggaggccgctgttacggcagcgcttgcgcgcgggtatcacgtcgtcatgacgaccggccgctgctaccggcagatcgtgccgtatatggcgcagtttccggccatgcgctatgccattacgtccagcggcgctgccgtggccgactgcgtgcaggatcggatcatttcggcgcagaacctcccggcagatgtcgcggcagagcttgtccgcgcgttcgaggggctcgacggcttcccgatcctcttcttcaacggcgaggcgctctaccgcccggagctgctcgatgacccgcagcgcttcggcatggatgcctatgtggacaatttcaaatcccactgcacggcctgcgaggacatggagcggcgctttctcgcagcgccctatcccgtggagaagctggatttttactttgtcgattccaccgagcgcgccaagtacctcgcgcgtgtgcaggatgtgcgcgcctgggtcgtcccgtgcgagagtgcgggtgtggagatcaacgccatcggcgccgataaggggagcgggctgcaggcgctgtgccgctgcctgaacattcccatcagcgcgacgatcgccatcggtgactcggaaaacgaccgcccgctcctgcgcgacgccgacctgccgctcgcaatgggcaacgcgatcgcagacgtgaaggccgcagcgcggtatgtcatgcccgactgcgaccacgatggcgtggccgaggccattgagcgctttctgctcgcgcaaagttgaccccgcgcgcgaagcgttgtatgataagatttgcccccatttttggggcagtgtaacaggaggcagtgtccatggacaacattcagcagctaaaacagtggatcgacggcagcgaccggatcgtatttttcggcggcgccggcgtctcgaccgagagcggcatcccggattttcgcagcgtggacggcctgtataaccagaagtatgattatccgcccgagacgatcctgagtcattccttcttcatggcgcacccggaggagtactacaaatttcaccgggataagctcgtcgtcgacggggccaagcccaatcgtgcccacctgcgtctggcggagctggagcgcgagggcaagctccaggcggtcatcacgcagaacatcgacggcctgcatcaggctgccgggagcaagaatgtgctcgagctgcacggcagcatccaccgctgctactgcatgcgctgcggccggccgtatccggcggagcgcgtcaaccacggcaccggtgtgccgcactgtgactgcggcggcatcatccggccggacattgtgttttatgaggagtgcctggacgacgatgtcgtgtccaaggcagtccattatatccgcgaggcggaggtgctcatcgtcggcggcacgtcgctggccgtgtaccccgcggccggacttttgaattactaccggggcagcaagctggtgctcatcaaccgcagcgccacgccgtatgacgatcaggcaaatctcatcatccatgagaagatcggcgaagtctttgcccaggtataacggaggaagcaggttttcatgcgaattgacgtaatgggcgtcgggtttgacagcctgacgatggacgaagcggtcgcgcgtgcgcgtgacctgatggcggagcggcgcgcggcctatgtcgtcacgccgaatccggagatcgtgatgctctgccgtgacgatcccgcggccatgcaggccgtacagggagcggatctcgtgctgccggacggcatcggcgtgatctacggcgcgaagatcctcggcacgccgctgcgcgcgaagctgccgggcatcgactttgcctcggcgctgatggcgcagatggggcaggagggcaaaagcgtgttcctgctgggcgccaagcccggcgtcgcggatgcggcggcggagaaaatgcgtgagcgttttcccggcctcgtcatcgccgggacgaacgacggctattttcaggacgacgaccccgtggtggagaagatcaacgctgcgcagccggatctgctgctcgtgtgcctcggcgcgccgaagcaggagctctggatgcagcgcaacgcaccgcgcctgcgcgtcggcctcatggccggcctcggcggcagtctggacgtgttcgccggcaatgtcaagcgtgcgccgaagtttttccagaagctcgggctcgagtggttttaccggctcctcaaagagccgaagcgcatcggccgcatgatgaagctgccgaaattcctgtttgcggccatcggctgcaaacttcgggggaagaaacaccatggcgaagggtaaactgattgtactggagggcattgacggcagcggaaaatccgcgcagtaccgccgcctgtgcgctcgttttgacgagatgggcatggcctatcatcacatcgtctttccgcgctacgaccaggagtcgtcggcgctcatccgcatgtatctcaacggcgcgttcggcgcgcatccgtcggatgtcaacgcctatgcggcgtccacgtttttcgcggtcgaccgctatgcgtcttaccgcaccgactggggcgagatctatgaaaatggcggcctgatcctctcggaccgctacacgacctcaaacgccatccatcagggttccaagctgccggaggcggagctgccggccttctttgactggctgtacgatctggagtacggcaagatgggcctgccgcgcccggatctggtgctctatctggacgtggacctgccgacctcgctcaagcggatgcagcaccggcaggaaaagcagaataccaaggccgatattcatgagcaggacgtgtcctatctggaaaactgcctgcgcatcggccgcctcgctgccgcgcactatggctggacgatcgtgccgtttatgaaagacggcgctgagcgcgcgctggaagaaaagcacgaggagatcttctccatcatccgcagcgcgctgtgagcatttccggggaaaaggatgccctgcgtgcgcagctgcgcgcccggctttcgcagagcgacccggcggagaacgccgcgtgcgatgtgcgcatcacgctgcaggtgctctcgctgccggcgtttcaggcggcggagcggatctttgcctattgcagcgtcgtgcccgaggtggacacgcacgccatccttgcgcaggcgcggcggcgcggcaagacggtcgcgcttccggtcacacagccggatgggcagatgcggttcgcgcgctttgacggtgcgctcgtgcccgggcgctttggcattcccgaaccgccgcgcagcgcgcggacgctgctgccgcagcccggcgacctgatgctcgtcccggcgctggcgtatgaccgcgcagggaggcgtctcggccgcggcggcgggtactatgaccgctttctggcgcgtgtggactgctgcaccgtggggctgatccgcgcggcgttcctgctcgacgcgctgccggccaaatggaacgatgtgccggtttccgccgtcataaccgaggacggcgttttgcgcccacaggaaaaaccggggctcccggaggagccccgatcggtgtcaggccgttagcagccgcagccgcagccgttgttgttgttgttgttgtcgcagccgcagttgccccagccgccgcagcagaagagcaggatcagaatgaggatgatccagagacagctattattatttccgcagcacataaccaaaaccctttctccgcgcaactgatttttgcgtggccagaccccgcgcggtgcatggatctggcgcaatgttttccggcgtgaccggagaaacggcgccgtttccgtccgtcgccttatcttatgcccctcggggcatgggggttcctgcgccgtgtgggcggcaggaacgaattccatgttgacagggagaccgaaccatgtctgatcactttaagaactttgatgagctgttccgcgacgagcaggattcgtcccgcccgcagcgttcggcagccgcgcagccggcccgccgccgtccggaacagccggaggggcagcgccccgcacatccggcccagccgcgcccggtacgttcggagggacagcactccgcgcacccggcccagccgcgtccggcacgtccggaggggcagcgccccgcgcgcccggcacagccgcatccggtgcgcccggagggacagcgctccgcgcgtccggcccagccgcatccggtgcgcccggaggggcagcgctccgcgcgtccccatcccgcgcagccgcatgcacagccccgcccggcccagacgcagacgccgcgcgccgaacagccgcggcagcagcggccggctcgcccccatacggagcaggcgcctgccgcgcgcccgcagccggccccgcgctccgcgccggaaacggaggtacaggcagcgcctgttgagcgcgctgcgcgcccggcagagccggaagcgccgcgccgcgccggccgcagcggctgcctcggcggcctgatctattttgcctttgtcgtcagcatcagcatcattctcgcctgcgtcggctggatggcggcgtcggacgtactcgcgctcaacaaagagccggtcacggcgacggtcacgctcgataagtccgagttcaaggacgtcaccatttcgtacacggacgccgacggcaatgccaaggagcgctccggccatcaggtgagcgtgggctacgtggcaaagcagctcaaggatgccggtatcatcaagtataagggcctcttcgagctttactgcagtgtttcgcacgcgaaaacgaagattgaccccggcacgtatgagctgagcacgaactatgattaccgcgcgctcgtcaagaagatgcaggtcggctccggcgccatggtcacgaccaaggtcaccatccccgagggctatacgatggagcagatcttccgcaagctcgaggatgaaaacgtctgttcgtatgacgaccttatggacgcggcggccaattattcctacaactactcgttcatcgaccagagcatgcagggcgacgccaagcgcctcgagggattcctgttcccggacacgtatgagttctatcagggcatgcaggcatcgagcgccatcaataagttcctggagaacttccacgaccgcatcacggccgagatgctcgaaaaggcggacgagcgcggcatgaccatgcaggaggtcgtcacggtcgcgtccatgatcgagaaggaagcggccaatgacgatgagcgcgccatgatcgccgccgttatctataaccgcattgctgcgggcatgccgctgcagatcgactcgacgatcatgtacgtcctgccggagcacaaggatgtgctcaccgtggaggatacgaagatcgacagcccgtacaacacctatcagaacaagggcctgccgcccacgccgatcgcaaaccccggccttgcgtccatcaaggcggcgctctcgccagcgagcacacaggcgctgtactacgcgctcgacgccgagtccggtacgcacaagttcttcacgaactatggcgagttccaggcgttcgtggccaaacagagttattcacaataagcggggacgaatatgaacaaaccggaattgttatgccctgccggagatctggagcgcctgcaaatggcgctccatttcggtgcagacgcagtgtatctggccggtgcgcagttcggtatgcgcgccggggcggaaaatttcacgccggacggcatccgcgcggccgtgcagcttgcgcacgtgcagggcgccgccgtgcacgtgacgtgcaacactctgccgcgcgatgacgagatggcgcagttgccggcgtatctggagctgctcgacgacgctggcgtggatgcgatcatcgcggccgatcttggcgtgatcacgctcgcaaagcgctatgcgccgcacgtcgcgctgcacgtcagcacgcagttcggcgtggtcaattcggcggctgccgcggcgctgcatgatctcggtgcgcagcgggttgtgctcgcgcgtgagctgtcgctcgccgagatcgccgccatccgcgcccacacaccgcctgagctggagctcgaggcattcgtgcacggggcaatgtgcgtgtcgttttccggccgctgcctgctgtcaaactatctcaccgggcgcgatgccaaccgcggccgctgcgcccagccctgccgctggaagtacggcctcacggagtccaagcgccccggccaggtgtttgacatcacggaggacgcgcgcgggacgtacatcttcaactcccgcgacatgtgcatgatcgatcacctgccggagctgctggcggccggcattacgagcctgaagatcgaggggcgcaccaagagcgcctattatgtcggcgcggtcacgaatgcctaccgccacgcgctcgacgatgccgtcgccgggcggccgctcgacccggtctggcagcgcgaggtgctgcagatcagccaccggccgtacagcaccgggttctactttggtcagccggggcagtacacggcaaactccgcctactttgccggggcggaggtctgcgccgttgtggagggcgttgcgcccggcgggcgcgccgtgctgacgcagcgcaacaagttttccgtcggcgacacgctcgagctcgtcacgaacgccgcgccgcccgtgaccttcacggcgcaggatctgcgcgatgccgatggccttccgctcgagagcgtgccgcacccgatgcagcgctttaccatgccgctgccgtgcagggccgcgccgctgtcgctcgtgcggcggaaattacccgccgaaacggttgacattcggctcgaatgtggtaaaatataaaaatccagaacagaacgcttggatggagaagaactgtgcagcacccggtcagcagagagaaggggacggtggaagcccttcggccggcagcatggcggccgctccggagcggcccgggacgaccgggacgtctgtccgcgttaaggacgacttgagacgccgcgtgagcggcaatcagggtggtaccgtgaatgctcgaatgccttcgcccctgtccatggggcggaggcatctttttttgaaaggagacgtgttatggactgtctgcgttgtcatggcgagatggagcatctggggcaggaatccctgcagctcgggcaatacggccttttgaccggccacttgtccaacctcttttccggtgcgctggaggtcgatatctatgcctgcaggcgctgcggcaagctggagttttaccgcgcggacgcgcccagcctttccgagcggctgcaaaaagagtgaagcaagagaatttgatttggaggatagatgattatgaaaccatatggtctgaatgaactgcgcgaaatgttcctgcgctttttcgagacgaagggacacctgcgtctgccgagcttctcgctcatcccgcaggatgacgcgagtctgctgctcatcaactccggcatggcgccgatgaagccctacttcaagggcgacaaggagccgccgcgccaccgtgtctgcacctgccagaagtgcatccgcaccggcgatatcgagaacatcggcaagactgcgcgccacggcacgtattttgagatgctcggcaacttctccttcggcgactacttcaagcatgaagccatcgcctggtcgtgggagtttctgacgagcccggactgggtcggcctcgaccccgagcggctgtacccgtccgtgtatgaaaaggacgacgaggcgttcaacatctggcgcgacgagatcggcatccccgagagccgcatcacccgcctcggcaaggacgataacttctgggagcatggctccggcccgtgcggtccctgctcggagatctattttgaccgcggcgaagcctacggctgcggcaagccggactgcgcgcccggctgcgactgcgaccgctatatggaggtctggaacaacgtcttttcccagtttgacaacgacggcaacggcaactattccgatctcgttcagaaaaacattgacaccggcatgggccttgagcgtctggccgttgtctgccagggcgtggattcgctcttcgacgtcgataccgtcatgaacatcacccacaaggtcagcgagatcaccggcgcgcactatggtgacagccaccagaccgacgtgtccctgcgcgtcatcaccgaccatatccgcgcctccgtcatgatgatctcggacggtatcctgccgtcgaacgagggccgcggctacgtgctgcgccgtctgctgcgccgtgcggcgcgccacggcaagctcctcggcgtcaacgaaccgttcctgtatcaggtcgtggatatggtcgtgcacgaaaacgagtgccagtaccccgagctgcgcgagaagcaggcgtatatcacccgcgtcatccgcaacgaggaggagaacttcgccaagaccatcgacgctggcatgcacatcttctccgacctgctcgccgagcatcaggccaagggcgagcgggtgttctccggcgcggatgcgttcaagctctatgacacctacggcttcccaatcgacctgacccgcgagatggtgcaggagcaggacatgaccgtggatgaggatgcgttccaggagctgatggagcagcagcgcgtgcgcgcgagaaaggcgcgcgaggcgctcggcgacctggcatgggccggtgtggacctcggcctggacacgacgccgacgaaattcaccggctatgaccacacggtcgatcagggcacgatcctggccatcgtctgcgacggtgaggtctgttcggagatcgatgagggcaagcagggcgtgctcgtgctcgactgcacgccgttttatgccgagatgggcggccaggtggccgacaacggcgtcattgagacggacggcgcgctcttccaggtgacggacgtccagaaggacaaggccggcaaattcctgcaccacggtgtgatgcactccggccgcctgcaggtcgagcagaccgtcacggcgcgcatcgataccgaccgccgcaaggcgatcatgcgtgcgcactcggccacgcacctgctccaggccgcgctgcgcgaggtgctgggcgatcacgtgcatcaggcgggctcgctcgtggagccggatcgcctgcgctttgacctgacgcatttctcggccatcacgcccgaggagctggagcgggtcaatgagatcgtcggcgactggatccttgacggcatggacgtcaccgtgtccgagatgtcgatggagcaggccaaggccagcggcgcgacggcgctcttcagtgagaagtacggcgatctcgtgcgcgtggtgaacatgggcggcaagtccgttgagctctgcggcggcacgcatgtggacaacaccgccaagatcggcccgttccgcatcacgggcgagagctcggtcgcgtccggcgtgcgccgcgtggaggcgatcaccggcaaggcctacctgcgcgagatggaggccgtcaaccgccgcatgtacgcggcggccgaggtgctgcacgccaagcccgccgacctcattgccaaggcaaagggcttcacggcggagctcaaggaggcgcgccagaacgttgagcgcatgaaagagaagatcctgcacagcgacgtcgaccgtttcctctatgcctcgaagaacatcggcggcatcaaggtcatcacgacgacgcgcaccgacctcgaggccggcgacctgcgcaagctcggcgacttcctgcgtgataaggatccggacacggtcgcggtgcttgcgacggcgacggagagcaaggtcacgttcgtggccgtctgcggtaagaacgccgtggccaggggcatccgcgcgggcgatcttgtgcgcgccgtgtcggcggtcaccggcggcaagggcggcggcaagccggactccgccatgggcggcggcagcgaggtgctgaagatcgacgacgcgctggccatcgtggacgatttcgtggcggaaaagctgggactgtaaggaggtttcattatgaacgactgcctgttttgtaagatcgcggcgggggagatcccttccacctgcctgtacaacgatgatgatgtttatgcgttccgcgacatcaatcctcagatgccggtgcactttctcgtgatcccgaagcagcacatcgactcggtcgcggccatcacggcggaaaactccgctgtggtcgccaagtgctttgaggtcattgcgaagctcgccgcgcaggagggactgaccggcggctaccgcgtcatctccaactgcggcgacgatgccggccagaccgtgcatcacctgcacttccacgtcctcggcggcgcgccgatgggcgagaagctgctgtaaaggcaacgaaattcggcggcgggacttgttccggccgccgtttttgtttataatgtccccagagatagaggggggagcgggcgtgcgaaagctggcatactgcgcaggcggattttcggctgcgatctttctgacgcattttctgctgccggcgcgctgggtgctgcccggtgcgctcgcggcagtcgtgctcgcgctcgtgacgctgctgctcccggggcagacgcgccgcagggtcatggccgcgctgctgtcggcagccattggcttcgggtggtacgctgcggcgtcggccctgcgcctgacgcccgcgcagaacgtttccggcgatgtgcagacggtcacggcgcgcgtgacggagtatcctgtcgcatatgcgcgcagctatgggctgaccgccctgctcacaagcccggacgtgcccaactgcaaggcgcggctctacgtctccgatgcggacgccgctgcgctgcgccccggcgacgagatcacggcggacgtgaagttccgcccatccacgctgcgctacggggaggagacggacgcctacatttccaagggcatatacctcatcggcagcgtgcgggacaaaacgctcgtgcgcaccggcgtctggagccgcagctggctctactggccgaaaaccgtcgcccagtcgctcaaaacgagcgcgcaggccgccttcccggcggatgtgctgccgtttgcgcaggcactcatgctcggcgataaatccgcgctctacgcgcaggatctggacattccgctcagcacgaccggtatcatgcacacggtcgcggtttccggcttgcatctggcgttcctgctgggctttttgcgtctgttcaccggcaaccggcgcatgacggccatcatcggcctgccgatgatggttgtgtttgtcgtcatggccggatgcagcccgtcggtgctgcgcgcggcgttcatgacggcgctggtgctttttgcgccgctgctcgggcgggagaacgacccgccgacgtcgctgctgacagcattggccatattgctcgcggccaatccgtttgccgcggcgagcatcagtctgcagctctcgtttgcgtccatggcgggcctgttttgtgtctctggtgcgctgtaccgcgcgctcgatgcgcgcctgctgcccgccgatgtgaagttctcgcgtccgcgacggaagatccgcgcctttttcagtgccacaacggcgagctccgtcggcgccatggtgtttaccgtgccgctcacggcgctgcatttcggcaacatttcgctcatcgcgccggttacgaacctgctcatcctgtggctgctgccggccgcgttcatcggctgctacctcgcggcgctgctcggccttgtctgggcatggggcggcacggcgctcgcgtgggtgacggcgtggccgctgcggtatatcctcgctgtggcaaacgtgctctcaaaacttccgggtgcagtgctgttcaccggcagccgcatggtcgtctggtggctcgtgctggtgtatgccatgttcggcgcggcgtggctgctctcccggcggcgtaaggtgcgctattggatccccgctgcgtgcagcgtgctggcactgtgcgcggtgctgaccgtcaatgccgtgcagctgcagcgcacatcgaccgtgacggcgctcgatgtcagtcaggggcagagtatcgtgttttccagcgggcgatcctgcgccgtagtggactgcggcggccgctctacggcggaagatccgggcgacctcgcggcgcgcaagctgctcgcgcaggggcaccggagccttgacctgctcgtgctcacgcacccgcacgacgatcatgtcaacggcgtgctgcgcctgatgcactggcttccggtgcgcacactggtcatcccggccgctgcggatatcacgcaggccccgctgagcgacattctcgcgctcgcggaggcgaaccatacgaccgttgtgcgcgtggacgcgcaacagacgatcgcggccggcggcatctccgtgcgcctgtatccggagccctgcgccggacaggaggacggcagcatgatcgtgctggcctccatcggcgattatgacacgcttgtgcccggcgacgtggacacgacggcagaggcaaagtttctcagcacctgcacctatcccgacattgagctgctgttcgtcggccaccacggctcgaaaagatccaccggtgacgcatggctcgatgccatcgcgccggacgctgcgatcatctccgtcggctacaacagctacggtcatccgacgagtgacacgctcgagcgcctgcaggcgcaccacataccgatctaccgcaccgatcagatgggcgacatcacggtgcatctctcgtgaggaaacgctatggcaaaagcaaaaggaaaaaagaaaacggaagtgctcgactacggcgcacaggtgcgcagcctgcgcgagcaggggccgggacggctgtacctgctctgggggcgggaggattacctgcgcgagcagtacctgctggagctgaaaaagctctgcctgcctggcggcgaggacgacttcagctatcaccggtttgacggggcggagctcgactttcaggcgctggcggacgcggtggacgcagtgccgtttctgaccgagcgcacgctcatcgaggtgcgtggattcgacacgaacaagtgccgcgaggaagaggcgcaggcgctcgtccgggtcatcggcgacctgccggattactgcacgctggtgtttctgatgagcacggattttgagccggacggccgcctgaagacgacgaaggccttcaaaaaatgcggtgagctcatccagttcaccgcccagggggagagcgcgcttgtgcgttgggtcggcaaacgctttgccgcgcacaagaagcacatttcgcccgaggacgcccgccagctgattttcttcaccggcggcctgatgaacagtatgatcccggagatcgacaagatcgcggcctacgtttcgagcgacacggtcacgcgcgcggacattctggccgtggcgcaccggctgccggaggcggtggcttacgagctgaccgaccggctggccgatcaggactatgacggcgccatgcgcattctcgcggacctcctcgccgacaaggcgaacacaccgatcttcctgctcgccgtcatcggccagcagatgcgcaggctttatgccgcgcggctcgcgcggcacgcgggccttggcacgggcgatctgcgcgcgctgctcggcctgccgtatgacttcattgcggaaaatctcctgcgctcggcccggaaattctccggccgccagctcgaggaggcggtgcgcctgtgcgcgcagacggactttgccatgaaaaacaccggcgcggacgatgccgagctgctcaaggagctgctgctgcgcatcgccgtgggaggcgcggcatgatccgcatccgcgaggccatcatcgtcgagggccggtatgacaaaaacacgctcgcgcaggtcgtggacgcgcccattctcgagacgtccggcttcggcatcttccacgacagccagcgcctggcactgctgcgccgcctggccgaaacgcgcggcatcatcgtcctcacggacagtgacggggcgggctttgtcatccgcaactatctgcgcggagcgatcgacccggcgcaggtcaagcatgcctatatcccggacgtagccggcaaggagcggcgcaagcgtaccgcctcgaaagagggcaagctcggcgtggagggcatgcggccggaggtgctgctcgaggcgctgcgccgcgcgggcgcgaccatcgagggcgaggacgcgccgctgccgggcgcgcgcatcacgaaggccgacctctacgccgccggactcaccggcggggcggacagccgggccgcccggcagcggctgcttgagcagctcgacctgccggagcatctgagcacgaacgcattgctcgaggtgctcaacgcgctcatgacgcgcgaggcgtttcggaatctgtgcaaatagctgaaaatcgccgtatccgggggagaaaacaccagatacggcgaaatttttcgtgcaaatgcgccgggcctgtggtatagtactgtacggaattatgtaaagtaatcggaaaccagatatatggaggatccacatatgaaatgtccgttttgcggctttgccgagagcaaggtcattgattcccgtccggccgaggagggcgcgaccatccgccgccgccgcgagtgccttgcgtgccagaaacgctttacgacctatgagatcatcgagacgctcccgctcgtcgtcatcaagcgcgacggcagccgccagagctttgacaagagcaagctcatcaacggcatggtgcgcgcctgcgacaagcgcaaggtgccgctgccggtgctcgaaaagatcgctgacgagatcgagcaggagctgcagagcgcgcttgagcgcgagatcacgaccgagcaggtcggcgagatggtcatgaagcgcctcaaggacgtggacgaggtcgcctatgtgcgctttgcctcggtctaccgccagttcaaggacattgatacgttcatgcaggagctgacgaagctcctcaacgaccgcggctaaaaaatgttgccgagcgtgatgcgctccccgtcggcgagcccctgaatacgcacgcgcagaagggcgatgtccgccgcggcggacggatcgccggtctccaccgtgcggatcgcccggcggaagccccccgtcacggcgtctgtgctctcgtgcgggagcatacagtgggcatagtcctcggtttcgctccagcgcgcagacgccgcgcgcagcgtctcgctcgcgcgcgccgggtctccggcggcgcagcttgcctccgcctgcgccacggcctcgtcgagctgcgtgcacatccgggacagataccgaagattccacgcgcacaggccgatgagcacgagcagcagcacgcctgcaaacagttcctttttcatccgagctcctttgccgcaaagtagatctgtccggcgtcgttcatcatcagcaggtagacgtccgcaatgcactgtgcgccgcgctgctgcacctgcttttgcagccagcgctcatcgcgccccatgcgtttgagattgtcgcgcaggatgcggccgttgttgatgaggatggagaaatagccggtgtcctcggtttccatgtgcatctgctcggccgttactggctgctgtgccggggcgaggatgatgttgagctggccgttggtttcgagcacggcgtattccacgctcgcaatgtcgagaatgccctgattgcgcagctcctgcgtcagctcgtcgagcgtgaagcggttgcggtgcatggcctgctgggcgatgcggccgcgctcgatgatgaagttcggccggccgtagagcagcttgcgcaggtgaatgctcttgtacgtcaggccggagaagatcagctcgcagcaaaacagcaccagcagcggaatgagcccgtagctcagcggcagggaagggttttgcagcggaatggacgcgatgtccgcgatgagcacggccaccaccagctcggacagttccagctcgccgagctgccgcttgcccatgaggcgcatggccacgatgagcgcaagaaaaatgatcagtgtccggatgagaatgatcgccatgagattaccacctttccaggtcggtttagtttttccgattcgtgcgggttcatacccgcgtaggaggtgtccgaaatgaagtttacaaaaatgcagggctgcggcaatgactatatctatgtcaactgcttcaccgagacggtggccgatccttcggccgcggccatccgcctgtccgaccgccacttcggcgtcggcggggacggtctggtgctcatctgcccgtcgaacgtcgcggatttttgcatggagatgtacaatgccgacggttcgcgctcggaaatgtgcggcaacgccattcgctgcgtgggcaaatatgtctacgaccgcggcctgaccgacaagaccgagctcacgatcgagacgcgcgccggcatcaagacgctctggctgaacgtggtcggcggcacggtcgagaccgtgcgcgtgtgcatgggcagcccggagttccggccggagaagatcccggtcgcggcggcgggggagaccttcctcgagcagccgatcgacgtgctgggcgcgacatggatcgtctcgtcggtcaataccggcaacccgcactgcgtcacttacgtggacgatgccatggcgctggacttcccgcgcatcggtcccgcgtttgaaaatcacaagctgttcccggcgcgggcaaatatcgaatttgtcgaggtcgtggacgatcacacgctgcgcgtgcgcgtgtgggagcgcggcagcggcgagacgctcgcctgcggcacgggttcgacggcggcgctggccgtcacggcgcggctgggcaagtgcggcgacgaggcggatgtgattctgcgcggcggcacgctgcacatcgcatgggatcgggcgcaggatctgctgtatatgaccggccctgcagcctttgtgtttgacggtacggtcacgctctgagcgcggccgcgatgatggtataggaggtcacaaaccatgaaaacgatcatcggaacgaaagcagatgttgcaaaagagctgacggcacaggtcgcggccgtgctcgcaagcaagccggaggcgaacatcgccatttcggcggtggatctgccggcggaagtactcgatgcgctcgctgccagcgacattgcctttgacagggcggcgctctttcaggcgtgcgaatactgcggcgcggctggcaagggcgcgcacgcggtcggcacggcgttttcgccgctcacggcggcaaagccgtttgcggctgtgcacgccccggacccggacgcggatgccgagcacgcggcggactacgacgccgccattcaggcagccggggggctcgatctggtgatcctcggtctgggtgagcgcggccacgttgcgttcaatgagccgggcgcgggatttggcgagaaaacgcacattgccaagctcgcggaggtgacgcgcgaggccatcgccgcggacttcggcacgctcgagcagacgccggagcacggcatcacgatcggcatccacacaatcctgggcgcgaaaaagatcctgctcgtcggctttggcgcgcgctgcgcgaaggcggccaacgccacgctcacgggccgtccggaaacgtttatccccgcgtcgttcctgcagctgcatacggatgtcgaggtttatcttgacgcggacgctgctgcgcagttataatcaatagttgcccgcggcgtttgcgggcgattctgatcggagggaagcatccatgtccaaatatttcggcacagacggcttccgcggtgaggccaacgtgggcctgacggtggagcacgcctaccggatcggccggtttctcggctggtattacggccgggagcacaagtgctcggtcgtgatcggcaaagatacccgcagatccagctatatgtttgaaaatgccctgtccgccggcctgacggcctcgggcgcagacgcctatctcatgcacgtgacgacgacgccgagcgtgtcctacatcgtccgttcggatgattttgactgcggcatcatgatcagcgcgagccacaatccctttacggacaacggcatcaagctgctcaacagcgccggtgaaaagatggagcagagcgtcattgacgagatcgagaactatctcgacggcaatctggagatcccgtttgccacggacgcgaatatcggccgcacgcaggactattccgccggccgcaaccgctacatcggctatctcatcagcctgtccacgcactcgtacaagggcatgaaggttggtctggactgcgccaacggcagcacgtggatgatggcgaagaacatcttcgacgcgctcggcgcggacacgtatgtcatcggcaatgaacccgacggcacgaacatcaaccgggactgcggctcgacgcacatcgagaacctgcagaagtatgtccgcctcaaccggttggacgtgggctttgcctttgacggcgacgccgaccgctgcctggccgtggatgaaaacggctcggtcgtcaacggcgacaagatcctgtatgtctgcgcacgcaatatgcagactgagggccgcttcggcaattccaaagtggtcacgacggtcatgtccaacctcggcctgtacaaggcgctcgacgaggccggcatcggctatgaaaagacggacgttggtgataaatacgtcgcagagaatatgcgcgccaacggacacctgatcggcggcgaacagtccgggcacattattttcggcaaatatgccaatactggcgacggactgctgacggccatcaagctcatgcaggtcatgctcgaccgcaaaaagacgctctccgagctggccgcgccggtgcgcgagtatccgcagcagctcacgaatgtggaggtcgatgacaaagacgccacgctccatgaccccgcggtcgttgcggcggagcaggccgtcaccgagcggctcggcgacgagggacgcatcctcgtgcgcaagagcggcacggagccggtgctgcgcgtcatggtcgaggcggccacgcacgcgctgtgtgaggaaaatgttgcgtctgtgatcgacgccatgcaaaagagcggacatttgatccgggtgagatgatatgatgacgatacaagacctgctcgacctgagcaagacgatcgcggccccgctgtttgcgggcaagacctatccgtgggaggctctggcggagatcggagatttcattcttcagctcggcccgacgctccaggcggaggaatacgagcagcgcggcgagaacatctggatcgcgcgcgatgccaagatctttgacagcgcctatatcgccggcccctgcatcattgaccacggcgctgagctgcgccagtgcgctttcgtgcgcggcaatgcgatcgtgggcaaaaacgccgtcgttggtaactcctgcgagctgaaaaacgtggtgctgtttgataatgtccagacgccgcacttcaactacgtcggcgattccatcctcggctacaagtcccacatgggcgcgggctccatcacgtcaaacgtcaagagtgataaaacgctcgtcgtcatcaaaaacggggccgagcacatcgagaccggccgcaagaaggtcggcgctatcctcggcgattatgtggaggtcggctgcaacagcgtcctgaaccccggcacggtcatcggccggcactcgaacatctatccggtgtcgtgcgtgcgcggcgtcatcccggcggacagcatcctcaagtcctcgggcgaggtcgtccacaagaaataaaagcaaaatcccatcggcgcaggccgatgggatttttgctgccacccgcggccttacagcagactgcggtagtcctcgtccggcgtcacgcagtccggcgggaagaactcgtcgatggggaagtggatgcggctgaacatcgagcacggatcgtcctcggtcgagccctggcacgctttgtccggcatgcagtagtcgtaggccgggatgagcagctgcgtgtcacgctcgagccggatgatcgaaaactgccccagcgtcacgtacagcttcttgccgcagcaagtcagcgagagctcttcgcccatggcgtcgaggatcttctgcgggatggcgcgcggctcctgctcggactccacggaactgccgctgtccaccaacttcatgtgcagggcgatcgggtcgacggattcgaccacgccgatcggcaggccgttctcgcacggatcgcagcagcagtcgtcggaggcaaatacctttgcgctcgcctgactgccgaagagcatgacgcgcttatcgaagatcgcaaggccgcacaccggctcgcagccggggaacgtctcgccgcgcacgcggtagaagtacgtcacgtccaccgtatagtagcccttgttgaaggtaatctccttgacgtgcacgtcggcgcacagcagctcggcgctgcgcggacgcacgctcagggcgcagtccagcttcgcctgcgagcaggccgtgggatacacccgcaggtcctccacgcagtctttgtcgcggcaggagtcgaagatcttgcgcgtatggatacaaaccgcttcccggactgcggcgctgccctcgaccggtcccggtaccactttgtctgccatttcataacctcctggcatcagattgaagcacgcttcagtaacagtgtatgcgtggcggttttcgatgtgattccttttgaaagcgctttacacaaaacgctttccgcgttataatatattattatcccatatgggaggtgcgccatggaagggctcggtttcattcacgagaaactcgacattaagatcctcatcctctacattttgaatcatttacccgcggcggtggatgcgcagacgttgtccgacctcgttttctgcgacaacggcatcggctattttgattacgctgactgtcttgcggatttggtggatacggcgcacatcacggaagagggcggcaagtaccgcatcacggaaaagggcagccgcaatgtcagggaggtcgccagcagtctgccgtactccgtgcgcatgaaggccgaccgcgtcacggagccgatcgccgagcagatgcgccgcgccgccatgatcgtcgcgcagcatacgaacacgccggagggcgggtgcaatgtgcatctctcgctttcggacgggatcggccggatcgtttccatgcagctgctggctgccgacgaggcgcaggcgcgcacgatggagcactattttaaggcacacgcggaggatgtctatcagacgctcgtgcgtatgctcacagaaagcgaggaaaacaaagcatgaacacctacatccccgagggctataagagcctgctcggcgtttatgacacgcagaaggccatcggcctgctcaaacgtctgtttgaggatcagctcgccgcgaagctgaatctgtttcgcgtttcggcgccgctgtttctggaagaggccagcggcctgaacgacaatctcaacggctacgagcgcccggttttgttcgatattccccaggctggcaaggaggcgcaggtcgtccagtcgctcgccaagtggaagcgcatggcgctccaccgctatgatttctatcccggcaagggcctttataccgacatgaacgccatccgccgcgacgaggatgtgctcgacaatctgcactcggtctacgtcgatcagtgggactgggaaaaaatcattgagagcagcgaccggaatctggactatctcaagtcgacggtcatggatatcgttgccgctgtctgtgacacgcagcgcaccatgcgcgcgatttatccgcagcttcaggtgctgccggagctggagcgccaggtgacgtttgtcacggcgcaggagctggaagatcgttatccggacctgacgccgaaggaacgcgagcacgccttcgtgcgcgagcaccacacgacgttcatcatcggcatcggcggcgcgctgcgctccggcaagccgcacgacggccgctcgccggactatgacgactggacgatgaacggcgatatcctgttctggaacgagctgctcgactgcgcgtttgagctctcgtccatgggcatccgtgtcgatcccgagagtctggatcgtcagctgaccattgccggctgtgacgaccgccgcgagcggacctatcacaagatgctgctggcaggccagctaccgccgacgatcggcggcggcatcggccagtcgcgcctgtccatgctgctgctcggcaaggcacatatcggtgaggtgcaggcgtctgtctgggacgacgagacgaccgccgcctgtgagcgggccggcatcctgctgctgtaaatacgtttctatgcaaaggcccggagccatcggcttcgggccttatgtcgtgtgtttttgcgcactttgtcgaattaagatgtgaaacatggccgaatccccgcacaaaggtgccgtggtgtgttatactgcctcacgcaaaggagggcggacgatgcagtcgttgtttcaaaaatacaggcacgcgctctggtttctgctcttcggtgcgctgtcggttttttatttcgtgtcgcagcacctcgggctgcggtatcatgtcgtgcatttgccgctcgatgactggcttccgttttggccgggctttatcgtgttttatgttttgtggtatttctatgtgccggggtgcatgctctgggcctgtttccgggccagggatgtgttttaccggcaggtggcggcgctgttttcgggtgcgtttgtctgtgcggccgtgtttgtgctttatccgacgtgtgtggattttcgcccgagcgcagcggggcccggcttggctcgtgcgctgtgccgcctgatctatgctaacgatgcgccggtcaacgtgtttccgagcctgcactgctatgaggcgctggtcatgcatctggcgacgtttcgcatgccgccgctgcgtgcgcgcaagcggctgcgtctggcgtccgctgtattggtcattttgatctgcctgtccacactgctggtcaagcagcactctgcggcggatctcatcgccggctgcgcacttgccgtggccgcgcattcgctgacaacgtatctgttttccaagaggaggtctcaccatgatcatacgaccgtttaatgctgcctatctgctgctccttgcgtttgccgccggagcggtcgtgctgctgtgggctctgctgcgcggccggtcggagcgctgccgtgccgccgtgcttatcgcgctgtgtgcagtgaacatcatcggatttttcgtctataaaggctttttgtcccgggatgtgcagtttttgcaggcgtcggggctcgaccggttcaactggttcaacgagctgccgctgcagctctgcaatatcaacatgttcctgatcccaatcggcatcctgacgcaccggcgctccttgctcgggtttgcctttttcgtcgcgccgctcggtgcgctcatggcgcttgtgtttccggaggcgccgtttgttggctactctctgtggctgccgcggatgctgggatattatatcacgcacatgctgatcctaatctgcgggttcagcctgacaacactgggcttttaccggcctcggctgaaggatctgccgggcgtcacaggggcgcttttgacgactgcatttgcggcattccttgtggacctgctgctgcggcacaccgtttgtccgcaggcaaattatttcttcgcgttcgggcaggacatagacgtcagtatcctgaacctgctctggaagtggataccggtgccgtttttgtatgagcttccggcgcttgccattctctttgtctatatggggctggtctgcttggtgttttccaagctggatgcgcaccgtgcacggcgggctgctgcgggataaacgaaaagcctgacgcagattgcgtcaggctttttcaaggtcatggcaaaaaatgccgccgcagagatccctccgcagcggctactggagcgggatacgggaatcgaacccgcctatcctgcttgggaagcaggtgttctaccaatgaactaatcccacaggtgcaattattatagcacggccaagtgtcgttttcaagtgaaaaatgcaacataccttgacatcctgctgcgggcaacctataataggcactcgtggcgttttacattgtttgctgatacatttaggagtgacgatatgccggaagaaacccttcgtgaaaacaaaatgggcacaatgcccgaaaataagctcctgctgtccatggcagtcccgatgatgatctccatgctcgtgcaggcgctgtacaacatcgtggacagtatctttgtctcgcgcatctgcgaggatgcgctcacggcggtgtccatggcgttcccgctgcagaacatcatcatttccatcgctgtcggcttcggtgtcggcatcaacgcgctgctgtcgcgcgcgctggggcagaaaaacgccgagcgcgtcaatcaggtcgcggtcaacggcctgctgctggcgctgctgagctatttgctcgtgctcgtcgccggcctggtcggcattcgtgcctatatgcgcgcacagacggacattgagtccattgtcgagtacggcatcacatatctcaatatctgcgtgctgtgctcgttcggcgttttcatcgagatcaccttcgagcgctttctgcaggcgaccggccgcacgatctattccatgatcacgcagctggtcggtgcgatcacgaatatcatcctcgacccgatcctcatcttcggcctgctcggtttcccgaagatgggcattgccggcgcggcctgggcgacggtgatcggccagtgcctgggcgcggtcgtggcggtcatcctcaatcattgcaagaatccggagatccacctgcgcctgcggcacatccgcccgagcggcaagctcatgggcgagatcacggccatcagcatcccgtcgatcatcatgagctgcatctcatcgctgacgtgcttcgtcatgaacctgatcctcatcacgttttcgtccacggcagtcgcggtgttcggcgtctatttcaagctccagagctttgtgttcatgccggtgttcggtttgaataacggcatggtgccgatcattgcctataactatggcgcgcagaagccggagcgtatccataagacgatccgcctcggcatggtctacgccgtcgcgatcatggtgatcggtctgctcgtattccagctcattccgaaagagctgctgctgatgtttgacgcctcggacgccatgctggagatcggcgcgcccgcgctgcgcatcatgagtctggcgttcatatttgccggtatcagcatcgtggccggttcctcgtgccaggcatttggctacagcgtctacagtatgtttatctccatcgcgcgtcagatcgtggtgctcatcccggcggcgtatctgctgtcgctgagcggcgtgctgcgcagcgtctggttcgcattcccgatcgcggaggtcgcctcgctgatcctctcgctgttctttttgcgcaccacgctcaaaaagacgggcatggcgatgccaaaaacgaaataaagctccgttccgcaaaggcggcgccgtacggcgccgccttttttcgtcgcgttccgcaccggccgaaccgggcctgcataggataatgcgggccgagtgcccgatttgaaaaggaggaacgactgtggacaaatgcaatttcaagcagggcccgctgccggaatgcgcgccgctggcgctggcgcagacgcccatgcagcagtccagcgaacccgcgtatgatcggcgcatggcactggcgcgcggtacgctgtttccgggactggacctgccgtttatgaacatggtcaacaaacccggcgacctcagcacgccgctgtgcgagctgatggcgctggacttcgtcatccgcgagctgaatctctacctcgacacgcatccggatgaccgcgaggcgttcgagacgctgcaaaaatgcatccgtatgcgtgccgaagggcacaagcgctacacggagcagtgcgggccggtcacggtgtcggatctcgcgtgcgcagacgtctatgactggctcaacgcaccgtggccgtggcagccggaaggggaggagaagtaagcgatgtttgtctatgaaaagaaactcgaatacccggtgcgcatccgcaacgccaaccccgcgctggcgaagttcatctgctcgcagtacggcggaccggacggcgagctcggcgcgtccctgcgctatctcagtcagcgctatgccatgccgtatccggagctgtcggcgatcctgacggacatcggcacggaggaacttggtcatctcgagatggtcggaacgatcgtctaccagctcacgcgcagcatgacgccggagcagatcaaacagtccggctatgatacgtacttcgtcgatcacacggcgggcgtctttccgcagtttgcatccggcacgccgtggacggcggcgacgatcggcgtgaccggcgatgtgatcgccgacctgtcggaggatatgtcggccgagcagaaggcgcgcaagacctatgacaacattctgcggctttgcgacgacccggatgtgacggatgtgatccggtttctgcgtgagcgcgaggtcgtgcactaccagcgcttcggcgaggcgctgcgtctggcgacggaaaagatggatcagaagaacgtctatatgaccaatccggcatttgatcgctcctgaaacgaaaccagcgccggcagtcagccggcgctggatttttctgcagcggcgcaatttgcgggacaaaaaagcaggcacccgaaggtgcctgctttgtggtagttgggggaaagcttactttttgatgtaagtccagcgctcggtgaccgggttcttcaggttctcaatgaaagccttgaagattccattatggtcagagtacgtgagaatgttaatgtcccaagtgtagtcgtggctgttggtggcttcctggatctcggcataggcccagtgcgaggaagtgcagtccggccaggtcttcatagccgcagcaactttggcatcgctgaagctggaattattcacaacgcggccgaggatgcggttcataacggcagctgtttcgccgcgcgtcaggttgtcgttcggtcttgcgctgccgttgtcgcccttgacaatgccgagcttctggagcaggttgatgtacttttctgcccagtgaccgttgatatccttgaagataccgccagtgatcggggtgttgagcgtatcgctgtagagcatggcgaccatcttgaagaactccgcacgggtgaccgcctggtcgggcttgaacgagccgcccggataaccggcgacgatgccggccttcgcgcacatctgcacagcgtcatagtaccaggcgccgctgctgacatcagagaagttgacagtgggcttggagtcgaatctggccttgacctgatccttcatcagacgatacagaatggtggcgacttcggcacgggtgatgcgtccgtccgggctgacagtgccatccggataacctttgatgtaagcgttgtggtcagtggtgttgaggatcatgtcgatcgtcgggtaaaccgtgatgacgtcgatgtcgggcttcttgccgaaggaccagttgaagccgacgagggactgatacttaatgttggtgttcgggtcggtccaggtggcggacacggagtaagtgttgaggtgatccttcttggagaagatggcgacgccgtagttggcgacggcagtggcgacctgatccttgttctggttgtagatcacgacctgagcgccggcagcgacgcgaccgtctgaggtctttacagcaaccagatagttcggcagtttggcgaacagattcttgatgacatcgctaacgacgccctcagtctccggggaagtctcctcgaccgtagccgcggtggtttcctcggctgcgacgtcttcatcggctgcaaaagccatgaccggcagcaggctgacgaccataaccagagcgagaagcacgcagagcagtttgcgggactttttcattgtttccactccttttataaatgtgcataagtgccgttatgccggatgtcgggtaacacagccgatccacgtacacttatgcgcctagtatacactgtcggccctgaaaagtcaagctatggaagcgctgtgcaaaggcgccgcaaacgcaaagatctgcaaaaaatggccggtcattccattgctcgcagcggcagcagcaaccatctgccgcaaacccgcgaatcgtgcgcacgatcgttgaataatgcatatatggtcaattaccggctcgagtgtctgcaaacaatttccctgccagaaaagaaaagtgaattttctattgacacactgggtaaaacgcgatataatcctattaacctatagagaaggtaggcgatgaaaatgcgagggcgcatttccggccgcctgtgtatctgctggcactgttgcggcggctgagcgcaggcaagtccatcacgagtcaaacatacatattttaataatacgatacataaatggaggaacatctcatgagtaagatctatacatccgctgaccagctgatcggaaaaacgccccttctggagctgacccatatcgaaaaagagcagcagctcgaggcccgcattctggcaaagctcgagtacttcaacccggccggttccgtgaaggaccgcgtggcgctggccatgatccaggacgcggagcagcacggcgtgctcaagccgagctccgtcatcatcgagcctacctccggcaacaccggcatcggcctggcgtccgtcgccgcggccagaggctaccgcatcatcatcgttatgccggagaccatgagcgtggagcgccgccagatcatgaaggcctatggcgcggagctcgtgctcacggacggcgcgcagggcatgaagggtgcgatcgcaaaggccaacgagctggctgcgcagatccccgacagctttgtccccggtcagtttgtcaacccggccaacccggcgatccaccgcacgacgaccggcccggagatctgggaggacacggacggcaacgtggatatcttcgttgcaggcgtcggcaccggcggcaccgtgacgggcgtcggcgagtacctgaagtcccagtgcccgaaggtcaaggtcgtggccgtggagccggagacctctccggtcctgagcgagggccatgccggcccgcataagatccagggcattggtgcgggctttgtgccggacgtgctcaacacgaaggtctatgatgagatcatcccggtcagcaacgaggatgcgtttgcgaccggccgcctgatcggccataaggagggcgtgctggtcggcatttcctccggcgctgccgtctgggcggcgatcgagctggccaagcgcccggagaacaagggcaagaccatcgtcgtgctcctgccggataccggcgaccgctatctgtcgacgccgctgtttgcagactgagtgcaggcaagcgttcgttcttctttcacatgcaacgggagacaccgcaaggtgtctcccgttgtgcatccggcacaattctgtgaaaaagcgctcccttccggggtcatcccggcggggagcgcttgtgcgttcagcggcagcgcatggccagaccgcagaacatatagtcggccatgcgcagcgcctcggtctcgatccggtcgaacatgcggatgtcggccgcatagtcgccctgcaggcgcagcgtggcctctttgccgtcaaaaaactcgcgccatttttcttcgttccagcaggcgttgatgccggcaagaaacgcgctgatggcgtcggcgtttgcgtaccagcgccgacgggcgtcgtcggccttggcggtctcgcggtttttcaggtcagtcacgagcgcaccgccgatctccagatgctccgtgagcaggtcgccggactgtccggccgtgcgcgcgggatctttggcgcatcttttgcgcagcaaagacaaaaagggatgcaattttgcgcccgatgcgctataatagatgccatcatgcagtaagagggatcattatgcgaatcgttgttaaagtcggcacttccacactcgcgcacgcgaccgggcggctgaacattcagcgcatggagcggctgtgcaaagtgctcagcgacctgaaaaatgcaggtcacgagatcattctcgtctcgtccggcgcgatcggcatgggcgtcggcaagctcaatctgtccggccgtccggcggatatgccgggcaagcaggccgcggccgccgtcggccagtgcgagctgatgtatttttacgataagctcttcacggagtacaatcatattgtggcgcagctgctgctgaccggcgaggacatccgcagtgagcagcgcagccgcaacgtgcgcaacacgctctcgcggctgctggagctgggggcgctgccggtcatcaatgaaaacgacgccgtggcgacggacgagatcggcgtggacaacaccatcggcgagaacgacagtctctcggccatcgtggctgccgccatcggtgcggatctgctgatcctgctctcggacattgacggattgtatgacagcgacccgcaccgaaacccggatgcgcggctcatcgagacggtgccggtcatcgacgcgcacattctctcgcttgccggagacaagggctccgcgctcgccaccggcggcatggtcacgaagctgcacgccgcgcagatcgcaacggcggccggctgcgaaatggtcattgccaacggcgaaaagcccgaggtgctctatgacattgtggccggcaggcgcgccggcacccgatttctgataccacattcctgaggagggactactatgacgactatggacattctccggcggacgaaggccgcgtggcccagcatctgcaacgcttccgccgaggacaaaaaccgcatcctgtccgccatggcggacagcctgcaggcggagtgcgatgtcatcctgcgctgcaatgccgaggacatggacgctgcacgcggccatatctcggatgtcatgctcgaccggctctatttggacaaagatcgcatcgacgccatggccgacggcatccgcgcgaccgtggcgctgccggatcacacggggcgcatcctcgcgcagatcgaccaccccaacggcatgaagatctataaaaagcaggtgccgctcggcctggtcgccatcatttatgagagccgcccgaacgtcacgtccgacgcggcggcgctcaccatcaagagcggcaacgtctgcatgctccgcagcggcaaggaggctttccgcacggccaaagccatcgtggccgcgctcaagcagggcatcgcgtccgcgggcggcgatccggacatcgtcaacatcgtggaggataccagccaccagagcgctacggagatcatgcaggccaagggccttgtagatctgctcatcccgcgcggcggggcggggctcatccgcgcctgcgtgcgcaatgccaccgtgccctgcatcgagaccggcaccggtatctgccacgtctacgtggacgagtatgctgacctcgacaaggccgtgcgcatcatcgaaaacgccaaaaccagccgcccctcggtctgcaacgccgaggaggtctgccttgtgcaccgggcggtcgcggccaggtttctgcccatgctcaaaaaggcgctggtcgatgaccgcgcggcgcagggcctcacaccggtcgagctgcggctggatacggcagcggcgcagatcatcgacggcaagagcgcttccgacaaggactttgacacggagtatctggactatatcctcgccgtcggcgtggtcgacagtctggacgccgccatcgcgcacgtgctcgcgcactcgacgcaccacagcgatgccatcgtcaccgaggacgccgcgagcgccgagcgcttcatcaacggcacggacagcgcggcaacgtacgtcaacgtctccacccgctttaccgacgggggtgagttcggcctcggctgcgagatgggcatctccacgcagaagctccacgcccgcggccccatggggctcgacgagctgagcacctataaatatatcatccgcggcgacggacagatccgctgaggagggaacactatgaaaaagtttgaagcaggcttcatcggcgccggcaatatgggcggcgcgctggccacggccgcggccaaacaggtcacgggggagctggtcgccgttgcctgcagcagccccgcgcacagcgcggcggcggccgagcggctgggctgccgtgcggccgcgccggaggagatcctcggcggcagcaaattcgtgtttctcggcgtcaagccgcagatgatcgacggcgttgtgcagtcgctggcagcgcccatcgcggcgtcggagagcatttttgtgtccatgctcgccggtgtgcagctggagcggctcgagcggctgctcggcgcggataagaagatcatccgcatcctgccgaacacggcctgcgccgtggggcagggcgtcgtgctctattgtgccaacggcaatgtcacggacggcgatctcgcggcgttttgcgcgctcatggcggccgcgggcatcgtcgaccccatttccgaggcgttgattgacgccggctgcgccatcaccggctgcggccccgcgtttgcgtatatgttcatcgaggcgctggccgacggcggcgtcaaatgcggcctgccgcgcgcaaaagccatccgctacgcagcgcagatgctcgccggcagcgcggagatggtgttgcagtccggcaagcacccggagcagctcaaggacgaggtctgcagccccggcggcagcacgatcgccggcgtcgacgcgctcgagcagcacggttttcgcggcagctgcatcgcggccgtggacgccgcgtttgaaaagacccgccagctcgggtgatcccagttaaaaatgccggccgggccgcacccattcgggtgcggcccggccgctgcatggttgcttatgcagacgtgatgtagcactcctcggcttcctgctgtgcatggatcagcagcagccgcgcctcctcatagtcgtgggtgtcgatttgctcaacggcgtcgctcagcgtgttgaagagggtgaagtacagtttcttgaagtccatggtatctcctttttgttctgcgtatttgcggtttccggcgcgtcttccggtcgctgcgatgcgcagtctaacacagaatggagcagaaacgtgtcgaatgctgtaggcgtcgaaaaaacttcataaaattcaaattttttgtcaggcatggaacgatctttgcgcgaagcgtcgaatcgcaaacgcccgcgcaccatatcggagcgcgggcgcggatcgtttatagcagcttgatcaggatcgtgacggcgcccagcaggatcagcacgctgccgccgtcggcatcgtgtccgactgggcggcgacggggctgaatcagtctgtgaaacagctttccgataaataatttctattacacaccattacacacccgttgcacaccgcatcgataatttgcacgcaaaaacggaaaaagaaaaagtcctgtattccttgagaatacaggactttttgttggtccgagtgagaagattcgaacttccggcctcttgaaccccattcaagcacgctaccaactgcgctacacccggatatcacatttgctcaaataatatagcacaccgcgcaaaaaaatgcaagagggaaatgcggctttcgggcagaaagtttttcgttacatttctttacgattgtatcagaattccgaatagataggtttcgaaataatcataaattttttaaataaataaattgaaattttttgggtgatttgttaacgtgttcttaacacctatgtgagatgatacagtcccatgcatgcggtggcatgcaagatccacttggcgaaatagaaacaaaggaggaaatatcatgacaggtaaaaaactgcagcgtctgctggcgtgcctgctggcggtcctgctgctgtcgcaggtcggggcgttctcgccggccgtgttcgcggcggatgacatcgactacacgctgcaaaacggtacggccatcattaagtccacgatgacgaccgatgaagtgaaccatgcgctgacgcgcgcgctggtcaaggattttgaccagaagagcgaggaagagcagagcgcacttctggatagtcaaactggtctcaagtgggagtacaagtgcgagggcaagagcaagagttttttgggcatctctgccacgcataccgactggggttccattaatgggtttactagcgtagataatagaatcaattttacccaccccgcgctgaaggacaacaaggatggcagctatcaggtgcgtgttgctgacacgacagcggaagtaacgctgacgaaggcggagaagctctcttcgtccatcacgctcaagcaggacgccagcgtgaagctgccgtataaggaagacggcacgctggattttgacgcgctgcgtgagaacatctttagcctggtcgtggagagcaccacgcccaagctgacggtcaacgacgtgaccatcgagtattatgctacgggcaagatccgcaagaactgggctcctctggagggcggcaaggtcgacggcctgaactatcccgccatttctgcgggtgagcagcagatccagatcagcttcaagggcgacgatacttacaaggctgacactgtgaaaacgactgtgaacttccttgaccgcgcggcagctccgttccagctcaagcagggtgtgaccgaagtctcgatggtctataacaaggatcagagcatcaactacgaggaaaccgcgcaggctctgcgcgaggcgctgctcgagagcaccgatccgaacgtctccatcaacgacgtgacggtggagtataacgccggtataggtgctatcaaaaattatcagcccttgaattatagcctgacgggcagcgactttattgaccagctttttaaatttggcctcggatcacagaccatccgcttcacctggcgcggcaacgcaggctaccaggcttatacggcggaagtcaccgtcgagatgaccgacagccgcgaggccagcgccgtcgtccttaagccgagcatctctctcatctacaataaggatgccgctgccatgacgcagcagatttttgaatacgtcattgattgggacgattccacgctgcccgacaagagcacgctgagcgcggacgactttacgatcgagtattacgcaacggctaaggtcgtggccggtgatcttggcggcgacgtaggactccaaaagtgggttccgatcgaaggagaagagggaatcagtgctggcaaactccagtatttctacccccagatgggcgctggtgagcagcagatccgcgtgaccttcaacggcaacgagacctatcgttccagcgaggctgaggaaggctcgctcacggtcaagaaggcaaatgtctccgtcaaggtgcactcgacgagcatctacgccgatgaagtgccgggcgagggcttcgtcaccaccgatcccgtggacgattttgacatcttcacagtctataccggcgtgtccagcgtgttcgtgcagctgcccgagcgctacacagacaacgcgttcatcaaggttgttgatcctgtgctcgaaaaagtcggtctgcggacgatcaaggatatcatggacaagggcatcactgtcggcgaactcaagcagaatctggacaagatcgccaatggcagcgagtatgccgtagtgcgtgaagcgctcaagctgatgggtgttgacgtcgctacgctgcagcagatcatcaacgtgttcaacaagatcaccctgctggacaatgtccgcattgccctgcgtacaccggatcaggtgggtatctacaccgtttacgcgatcacgaacaacgataactacaacaccggcttcggtatgggcgctctcgttgtgaaaaagcactactccggtgtgaagctcgactggaatcaggacttcaccaatggcaagatttccgctgcggacgtgaagaacttcgacttcggtgcgacgctgagctataacggggaacaagtcgaggatcagtcctctgtgcactacctgtactccggcttcaccagcaggtggaagccgtactccagcaccacgacacccccgactgagcccggccgctatgttgtgacggtcgtgactctgggcggcaactatcaggcagcgcccatcacgcgcgctttccagatcaccaagtaattttctcgcgtgtgtctcccgggcttttttgcccgggagacatttttgcgccggaggagaccggccagagcggaaaatgaaaatcgccgaaaattttttcaaaaataacttgacagcagtcgaatcgtctggtatattaaacaagcgctgaggcgacgaggccgagtagttcagttggttagaacgctagcctgtcacgctagaggtcgagggttcaagtcccttctcggtcgccacccgcggggcgaaagctccgcgggctttgtatgctgctatagctcagtcggtagagcgcatccttggtaaggatgaggtccccggtccgaatccgggtagcagctccagaaaatcctgcaaccgttgcggttgcaggattttttgtttatcaaagaccgcgcaaaaaccacgacgccggacagggaagccctgtccggcgtcgttttgcctatgttcggtttcagccgccgaagccaatgcacggtgtgcggcccccgccgtttggcgggggcttacgttttccttgccgcgggaaatcgatatgcgaaagcctgccaaaaaagtccgtgcggactcctttgacaggcgtagcgagcgggcctgtaagccgggttctgtaatcgacagccatctatctagacgcaccgttgccggtgcgttccagccacctccatgggacggccgggccggccatatgtccctccgcggtgttgctccggatagagtttacagcgccgcactgtctccagccggcgagtgagctcttacctcacttttccacccttacccgatcgctcgggcggtttgtttctgttgcacttgtccgagggtcgcccctggcgggtgttacccgttatccttgccctgtggagcccggactttcctcacgcacagcctttcggctcgtgcccgcggctgtccggcctgctcgcccgactattttacacatcctgccgcaccgcgtcaagtccggcagtgatttattttcttgtaatcggcacgaatgagcggtataatctccacgtatgattaccttttggaaaaggagtgtctgcatgaccttttcggactatatggactatctgcgcggcaagcgcatcggcgtcatcggcttcggcgtgagcaatcagccgctcgtgcgcgtgctgctgcgcaacggctgcgacgtgacggtgtgcgaccggcgcgaccgcgcccagctcggcgcgaccggcgacgaggccgcggcgcagggcgcaaaatttatccttggtgcggattatctggagcatctggacttcgacgtcatcttccgcacaccgggcgtgctgcccatcgtgccgcagctgcgcgcggctgcgcaaagcggcgcgatcctcacctccgagatggaggcgttctgcaatctctgcccgtgccgcatcatcgccatcaccggcagcgacggcaagaccacgacctcgaccatcacggccgagctcctgcgtgcgcaggggtacaccgtgcacctcggcggcaacatcggcacgccgctctttgaccgcattccggagatccgtccggaggattttgccgtgctcgagctcagcagcttccagctgcacagcatgcactgcgcgccggatgtggccatcatcacgaacatttcgccgaatcatctggatgtgcatccggatttcgaggactacgtgtcggccaagtgcagcatttaccgcggccagcggccggacggctgcctggtgctcaacgcgaaggacgcccacacgccgcgcttcgcggccgaggcgccggggcgcgtgcgctatttcagcagcatcggcccggtggaaaacggcgtttactgcacggatggtgtgatttaccgcgcgcacgatggcaaggcggagaagatcctcgacgccgccgagatccgcattcccggcgcgcacaacgtggaaaactatatggcggcctttgccgcaaccgacggcctggtcggcaatgcggcgtgcgttcaggtcgcgcacaccttctctggcgtgccgcaccgcatggagcgcatccgcgagctcaacggcattacgttcatcaacgattccatcgcctcgagccccacgcgcacgatcgcgggcctgcacgcgctgccgaagccgccggtcatcatcctcggcgggcacgacaagcacatcccgtttgatacgctcggtgacgaggtctgcctgcacgcgaaggcggcggtcgtcgtcggcgagacggcgcagcgcattgccgccgccatccgcgcgtcgaaatgctatgacccgggaaagctgccgctcgttgaggcgccggattttcgcgcagcggtcgagacggcctacggccttgcgcagccgggcgatatcgtgacgctctcgccgtcctgctcatcgtttgatttcttcaaaaactttgaagagcgcggcaataccttccgcgccattgtggaatctctgcaataagcgcatgaattgccccgccgctgcatagcatggcaggggggatctgctatgatttgtgcacctcgccgctggagaccggctgcccgccggtgcccgctgcggccgaaccggaagctggcggcgctgctgctggtatgcattctgttgggcggcatggcgtattttaccgtgtcggtgctgcacctgatcatgcagctggccgtcaactccgcctgcgacctcatgcagctgaaaatcaacgccgccgtcacggcggcgacggcgcaggtgcagggcgactattatacctaccgcacggacgctgacgggaccattacggccgtgagcatcgacaccgagcacgtggggcaggtgtcctcgctcgtgctcgagcacatgatggacggggacgacgggcaggtcgagctggacatcccgcttgagacgctcttcggcgtgaattttctgccggggctcaagctgccgctgccagtgcgcatccttgtgctgacgacgtcggacgtgaactatcacaacgagctcatgtcggccgcgatcaaccagagcaaatatcaactatatctgaacgtgaagatggatctcgacattctggtgccctgggagcacaagaccgagaccgtgggcacgaacgtcctgctggccgagacggtcatcgtcggcaaagtgccccagacgtatgtggaagtggagtagacaacatggatgtacgcgaagagatcctgacgctgcgccgtcagctggaacacgcaaattttctctattacgtgaaggacgcgcccgagatcagcgactttgaatacgacgcgcttatgcgcaggctcgaagagctcgaggcggcgcacccggagtacgcctcgcccgattcgccgacgcagcacgtcggcggctacgcgctcaacacctttgcgcaggtgcgccatcaggtgccgctcgagagcctgcaggacgtgttctcgttcgacgagctgcgcgcgttcggcgcgcgcatggacggtgcgctcacgcaggcgcatgattattccgtcgagccgaagatcgacggtctgtccatgtcgctcgagtatgaaaacggggtgttcgtccgcggcgctacgcgcggcgacggcatcaccggcgaagacgtgacggaaaacctccgcacgctgcgcaacctgccgctgacgcttgaaaacgcgcctgcaaagcttatcgtgcgcggtgaggtctatatgtcgcacgaagtattcgcagcgctcaatgccgagcgcgagctgctcgaacagccgctgctggccaatccccgcaacgcggcggcgggctctgtgcgccagcaggacccgaaggtcgcggcggcgcgcaagctcgatatcatcatcttcaacctccagtttgacagcgaccgcacgtttgccgcgcacacggaaacgctggactatctggcgtcgctgggcttcccggtcgtgccgtatcagcgctgtgaaacgctcgatgcctgctgcgcgcgcattgactggatcggcgacaaccgcgagacgttcccgttcgacatcgacggcgcggtcatcaagatcaacgaccttgcgcagcggcagtatctcggcagcacggcaaagttcccgcgctgggcggtggcatataagtacccgccggagaagaaggagagccgcgtgcgcgacatcgtcgtgcaggtcggccgcacgggcgtgctcacgccgaaggcggtcattgagccggtgcgtctggccggcacgaccgtcacgaatgccacgctgcacaatcaggacttcatcgacaacctcgacctgcgcatcggcgacacggtgctcgtgcagaaggcgggggagatcattcccgagatcctctccgtcgtgcgcgataagcggccggagggcacggtgccgtttcatatgccggatacctgcccggagtgcggcgcgcccgtcgtgcgcgacccggacggtgcggccctgcgctgcacgggtgcggagtgcccggcgcagcggctgcgcaacattgcgcactttgcctcccgcgaggcgatggatatcgacggcctcggcatctcgctgtgccagtcgctgattgaggcggggctcgtgcactccccggcggagctgtatgcgctcgagccgcagtcggtcgcggcgctggaccatatggggaagaagtcggccgagaatctcatggccgccatcgaaaagagcaaggatgccggcatggcgcgcctgctgtgcgcgttcggcatccggcaggttgggcagaaggcggccagagtgctggccatgcacttcggcacgctggacaagctcatggcggcgacggaagaagagctcatggccatccctgacgtcggcccgacgacggcggcgtacctgcgtgcatggttcgataacccacaatcacagcaccagatccgcctgctgcgcgatgcgggcgtcagctttgattccagggagcaggtcgtggaccgccgctttgccggcaagacgtttgtgctcaccggcgcgctcgagcacttcagccgcgacgaggccagtgccatcatcgagcgcttcggcggcaagacgagttcttccgtgtcgaaaaaaacgtcctatctgctcgccggcgaaaacaccggctcgaagtatcagaaggcgctcacgctcggcacgcctatcattacggaagctgaattcctggacatgatccaggagtaacgaaagaaacggagtggaaatcatgcgagattacgcaaaagaatttgaaaaccgcgtcgcctttatccgcgacctgctcaaaagcagcggcgccaaaggtgtcatctacggcaacagcggcggcaaggacagcgcgctcgtcggcatcctctgcaaggccgcgtgcgacaatacggtcggcatcatgatgccgtgcgcctccaagcgcaacttcggcgaggacatgaccgacggtctggccgtggccgagcagttcaacatcgagacgcgcacggtcgatctcacggcggaaaaggagctcgtcatgcagacggtctccgccgtcacgacgctcaaccagatggcgacgtcgaacatcgccccgcgcctgcgcatgctcacgctctacaccatcggcgcggccgagggccgtctcgtcgccggcaccggcaaccgcagcgaggcatacatgggctatttcacgaagtggggcgacggcgcgtatgacttcaatcccatcgccgacctgaccgtgacggaaatttacgagttcctgacctggctgcatgcgccggaaaacatcatccgcaaagcgccgtccgccggtctctttgagggtcagacggatgagcaggagatgggcgtgacctacgccgccatcgacaaatacatcctcaccggcgaggccagcgagcacgacaaggccatcatcgatcgctaccatagccgcagcgagcataagcgccgcccggccgcaacctatcacgccgaatgacgcagtatttcgatacccacgcacactacgacagcggaaagttcaacgccgaccgcgaagaggtgctgcgcgccgtgcatgagagcggcgtcgcgctcatcgtggatcccggcgactgtgctgcgacgtccgcgcgcgccgtcgccatcgcacaggaatatgatttcgtctatgccgccgtcggctggcacccggaggaagccgccggctggacggacgacagtctggagcagatccgcgcgctggcggcgcagcccaaggtctgcgccatcggcgagatcggtctggactattactgggacgcttccacgaaggcgacgcaggagatcatgctgcgcgcgcagctggagctggcgctggagctggatctcccggtcatcatccacgaccgggaggcgcacggcgacagcctgcgcattgtgtgcgattatccaggcctgcgcggcgtgttccactgcttttccggcagcgtggagatggcgcgcgagctgctgcgccgcggctggtacctcggctttgacggcccgatcacatataagaatgccgtcaaggcgctggacgtgatcgccgcctgcccgacggaccggatgctgctcgaaacggattcgccctatctgtccccggtgccgaaccgcggcaagcgcaacgattcgcgcaacctgccgtacattgctgcgcgcatagcggagatcaagggcatgaccacagaagaagtcgcggaggtgacactgcaaaatggaaaacaactcttcggcctctgagcgctggctgctgcgcggcgcgccgaatgcgcgcgacctcggcggcctgcccaccatggatggccgcacgatccggccgggcctgctgctgcgcagcggcgaacttgccggcatcacagagccggacgcacagacactcacggaatatccgctgcgcacggtcgtggatttccgcacggacctcgagcgggagcagaaaccggaccgtgtcctgccgggcgtgcagtatgtccactgcccgatcgtgcagcaggcggcggccggcctgacgcgcgaggagcacgccgacccctatgcggccgtcgtcgcgcacgcgaaagcgatggccggccgggagcgggcgttcatgtgcgaactgtaccgcagtctcgtcacgcaggcattctccatcgcgcactaccggcagttttttgcgcttctgctcgcgcagacggacggcgcgctgctctaccactgcacggcggggaaagaccgcgtcggtgtcggcacgatgctgctgctgacggcgctgggtgtggactggccggtcatcgtggaaaactacctgatcaccaacgagcgcatggccgcctcgaccgactgtctgctgacggcggtcgtggactatgacctgagcgaggcggagcgggaggtcatccgcacgtttgaccgcgcggacgcggcgttcctgacggctgcgcgcgatgcggtcgcggagcgatacggcagtgtggacgcttttctgacgcaggcgcttggtgttggcgcggccgagcgggcggcgctgcgcgcgcgttacctgacagcagaataaaaagacggcgtgctgcccatttgggcggcacgccgttgtgatgctgtgtgtttgcttacagctcctgtttcggcatttgatcggacaggtagatccggatgggatcttcctgcgcgtgaccatacggcaccttcggcgcacggaagagattcgtttccggcagcaccgtgctgagcacgacgtggaacgtggttccgccccattcgttgctctccaggagaatggtgccatcgtgcttttccgcaatgccgagtgcgaccgtcaggccaaagctgttgctgctcagatcggaaaaatccacgccggtcacacgcagcgggataaagatcgtcccgagtttttccggcgggatgcgtacaccgtcatcccgaatggtgatgtcggcgtggtcgccctcctgcgtgacggtaaagcggatgcggtcgccgtgcttgcagcgctccgtgcagttggcaatgatgttgagcagcatgcgctggatgagcgccgtgtcgagcgcgcagttgatcggctcgtccggaatgctgacctccagcacgatgccgttggcgtcggtgatcggctggatgttatccagcagcgtccggcattccttgcccaggtcgcacagctgcggcatgaacgcaagcgtgccgtcgtacaggccggaggccgtggaggcgttgagcgtgaagcgcagcagccggtagtaaaactgcgtcaattcggcggcgttgcgccggaagcgcacgtcgctgagctgcatggcgtagtctgaaaaatacgtcgtgagcgtgcggaaagcgttgagagatgccagaaacggtgcaaactgcgcgccggcccgcagggcgttttcatcctgcggcacgaacgagaacagccgaaacgcaccaaacgatgtcacggagatgatgacgtggcgcttttcgatcgtggcagacgtgacgaattccgtagccgtggcctccgtgatgtgcgccggcagcagctcggtgagtttgtgatttgtgcggttgccgcgaaacagttcctgcgccgccgggttcataaacgcgacaaattgctcctgcgcgccgatcacggcggtgttgctcatcgaaaacagcgtgttgagcgagtcgatgatcaaagtattgctcattttccgatcccccctaagatgtattaaaaaacagtatagcagaattcgtcaatagacacaagcttttacacgcaaaaattcggagatttgttgcaaatagccagcgccgcctgccgcgccgataagaatgtggttgcgctttcgacggaattgttatagaatgtagctgtaagaaattgcgctgcgtgctgtgcgcagcagatataacaggaggaatagagcatgattaaaattggcatcaatggcttcggccgcatcggccgtctggtgttccgcgccgcgatctgcgccgacgatattgaggtcgtcgccgtcaacgcgccggataagacgcccgagcagctggcgtataccgtgaagtacgattccgtgcacggccgctttcacggcacggtcgattgcgagggcggcgagaacccggccctgatcgtcaatggcaagcgcgttgcgctgctcaacaaccgcgacgcgaagctcctgccctggggcgagctgggtgtcgagtatgtgctcgagtgcaccggcgcgtttctgaccaaggaaaaggcgcaggatcatctggacgccggcgcgcaggtcgttgtgctctccggcccgtccaaggacgacacgccgatgttcgtctgcggcgttaacctcgatgcgtacaccccggatatcaagatcgtgtccaacgcttcgtgcaccacgaactgcctggcgccgctggccaagatcatcaacgataatttcggcatcgccgagggccttatgaccaccgtccatgccgacacggccacccagcaggttgtcgacggcttctccaagaagaactggcgtctgtcccgcggtgtgcacggcaacatcatcccgaccagcaccggcgctgccaaggcggtcggcaaggtcattccggccctgcagggcaagctgaccggcacttccatgcgcatcccgagcgcggacgtgtccatcgtcgatctgacctgccgcctcgagaaggctgcgacgtatgatgagatctgcgctgccgtcaaggctgccgcggaaggcccgatggccggcgtcgtcgagtatgtcgatgacgaggtcgtctcctccgacttcatcaccgatccgcacaccagcatctttgatgccaaggctggcctcgcgctcaacgatcacttcgtcaagctcatggcgtggtacgacaacgagtggggcttctcgaacaagatgctcgacctgacgcgccacatcgactccgtgcgcaaggcgtgatcggaaaaacaaaccgcaaatcaggggaatgcgctgcattcccttgattttttctgtccggtagtgtaaagtataccggcacgtgaaatttcagcgggggagggagtgcggtttgcaggaaagcagcaagcagaactatctccacggcgcggccatgatgacggccggcgttgtggtcatcaagatcctcggcgcgatctataagatcccgctcggcaatattctcggcgacgagggatacggctatttctccgttgcctataatatttattatgtctttctcaacatggccacggcgggtatgccggtcgcgctctcgcgcatgatcagtgaggcggacacgctcggccgccccgtgcaggcgcgcaagatcttccgcgtggcctggctgacgtttgccattttcggactgctgctcggactggtcatgttcctgttcccgacggagctggccgggatgctcaacaatgtccgcgcggcacagagcatctgggcgctgtcgccggcgctcgtgctcgtgtatctgacgagcacgtaccgcggctatgcgcagggcatgagcaacatgaagccgacgaccgtctcccagatcctcgaggtcgtgggcaaggtcgccgtcggtcttgtgctcgcgtggagctttacgcgcgcgggcaagagtctgccggtcgcatcggcgggggcgatcttcggtgtcacggcgggcggcgcttttgcgctgatctatgtggcgatctattatcaccgccactatccggaaaaaccggtcgcggatccggatgtgccggattccgccggacatattctcgtcacgctgctgcgtatcagcatcccgatcgcgctcggctccagtgtgctgagcatcatcaatctcgtggacacgaagctcatcatgtaccgcctgcagacggcgcttggctattccgagtcgtatgcaaacgttctctacggcgtttacggcaaggtgcagacactgtataatctcccggccgctttcgtgacgccgatgacgatcagcatcgtcccggccattgcggcggcggtcgtgcagggaaagtatacgcagtcgaagaccattgcggaatccgcgctgcgcatttccgcggcggtcgccatgccgatgggcatcgggcttgccgtgctgtcttacccgatcgtcaacgtgctctatccgcgcagcaatgcggccggcccaacgctgctgatgctgctgggcattgcgtcggtgttcgtgtgcatttcactgatcacgacggcggtcctgcaggcgaccggccacgagatctacccggtctattccatgctggccggcggcctggcgaagatcgcggtcaactggttcctgatcgcggtgccggagctgaatatcaccggcgcgccggtcggtacgctcgcgtgctatcttgtcatctgcaccatgaaccacattttcctgtgcaaaacgctccgtgagcggccgaatgtcggccgggcgctcgtgcgtccgctgctgagcacgctcatcatggctgtcgtggcctggggcgtgtatgcgggcctgtccgccgccatgggcggcgacctgagctggaagcgcatggcgctggccatgctcgtgtcgatggtctgcgcggtcgtggcgtatctgattgcggtcgtaaaaacgcacgcgatcacgctggccgatctgcagctgatcccgaagggcgaaaagctcgcaaaagttctgcacatcagatgacataacaccgaaaaatcctgaattttcaatggttttttgaaaaaagggttgcagaaggagcaaaattgtgttagattttctctgcaaagaaagctatgacctgcgcgactttgtggcgctcatcacgttcctgcgctcgccggatggctgcccgtgggatcaggtgcagacgcacgagagcatccgccgcaacttcctggaggagacgtatgaggtctgcgaggccatcgacgccggtgatacggcgcacctgaaggaagagctgggcgacgtgctcatgcaggtgctgttccatacggatattgagcgcgaggccgggcattttgatattgacgatgtggcggacgctgcctgcaaaaagctcatctaccggcatccgcatgtgttccggcgcgacgagccggatgcgccggactgggacacgatcaagcagcgcgagcgcgcgcagacgaccaccgccgaggcgatggacagtgtggcgcgcagtctgccggcactttggcgctgtgaaaagatccaggccaaggcggccaggaccggctttgagtggccggacgcggatgcggcgctcgacaaggttgccgaagagacgcgggaactgcgcgaggccgtggcctccggcgacgcggacgccgtaaccgaggaactgggcgatctgctgtttgccgccgtgaaggtggcgcgctttgcgggaatcgaccccgagcaggcggcccatgccgcgtgcgaaaaattcatccgacgctttgccgccatggaggccgcagcggcggacagcggcgtgccgctcgagcagcgcacgctcgcgcagatgcagccgctctggcagcaggccaagcagacggccagcgcggacaacgaaggaaagaaatctgcacggcagtgagagacccgtgcggaattctatatcatggcatatgccaacacaaacatgaagtaggaggattaccatcatgaataaggcagaactgatcgcaacagttgccgaaaagaccggcctgtccaagaaggacagcgagaaggccgtcaacgcgacgtttgacaccatcaccgccaacctcgaggtcggcgaaaaggtgcagctcgtcggcttcggcgtgttcgacatcaaggagcgcggctcccgtatcggccgcaaccccaagaccaaggaagagatcgagatcccggcgacgcgcgtgcccgtcttcaaggccggcaaagtgctcaaggacgctgtttccaaataagcgatgcaaacgctccgggcctgacccggagcgtttttcacaggaggatgcctatgcgcctggacaaatatctgaaagtttcgcggctcatcaagcgccgcaccgtggcaaacgatgcctgtgacggtcagcacatcacggtcaacggccggacggccaaggcgtcgtatgacgtgaaggtcggcgacgtgatcgagatcgccttcggccagcgcaccgtgaaggtggaagtgctcgccgtcacggaaaacgcgaaaaaaggcgacgctgcggccatgtaccgcgagctcgccgaatgatgcgcgcaaaaaaccgccgctccggatgttcggagcggcggttttgccgtatgtcagatcatatattttgtaatctcgctgccggtcaccgcgggatccatgctcagagacagggtgaactgaatgtgttcccgctcggagaaatcattcagccaggccaggaactccgcgatctgcggctcagagacctcagatagcattttcgtgaagttgtcaacaaacacatgggtgatatcgtagttgccggcatgaaggccgctgaggaagcccttaaagaaatcgtaagagcccatcgcgtacgcatagtcgcaggcgtagatcaggcgagcctgatagggaatgtcatacgtaagttttttgtccttttcaatgcacacgacagaaccggattcctcgcggacggccgtggcgaccatttccaccaaacgcttcgttttgccggaacctttgagacccatgatcagttggaccatatgtcaatcacactccttttgaaagtcagggcgataccctatgcctagattagcacgttttcgcgccgactgcaacgataacttttctcagtttgcctccggtttgccgagcagggagaacatattcttcttatatgcctccacgccgggctgatcgaacggattgacgccggacatatagcccgaaatggcacatgccagctcgaagaagcacacgagccaggcaaacccggcctcgtcgcgcttcggcacgcgcacctccagattcggcacgccgcctgcgatgtgcgcggccttgacggcttcctgcgccatgcggctgatgtcgctgagcttgcgcccggcaaggtagttgagccggtcggggtcgcccatggcgaacgggacggtgaactcattttgcggctgctcgaatgagacgacggtctccatgagcgtgcgcgggccgtcctgaatatactgacccatggagtgcaggtcggcgttgtattccacggaggcggggaagatgccgatgccgtttttgccctcgctctcgccgtagagctgcttccaccactcggccatgaaacggaacgacggctcgtagcaggcgaggatctcggtcgtcttgccgagctggtacaggtgctggcgcgcggcagcatactgccaggcggggttttcgggcgactgcgcgctcatggctgcgaaagcctcgccggcctcgccgatcacggtctgtacatcaataccggcggcggccatcggcagcagaccgacggcagacagtacgctgtagcgcccgccgacgtcgtccggcacgacgaaggtctcccagccctcttcgtccgccatgtgcttgagcacgccgcggtgggcgtccgtcgtggcgaaaatgtgctttttggccttctccggaccgtactttgcctccagcaggccgcggaacatccggaacgcgagcgcgggctcgagcgttgtgccggatttggagacgacgttcaggtcaaagtccagatcgcccagctcctcgagcagatgcatcagcgcgtccggcgacagggagttgccggcaaagagaattttcgggtcgccgggctgcggccgcggccgcagcagctccaaggcgcccttcgcgccgagatatgacccgccgatgcccacgacgaccagcgcctgcgagcggccgcggatgcgggatgcggcggcgaggatctgcttgagctctccgctttgcatacgctccggcagatcgagccagccggtaaaatccgcaccggcgcccgtgtgctcgagcagcgtgcggtgcgcctgtgcagcggccgcgtagtccggccctgcggggtcaaaaaatccggccgcgccggagagatccactttgatcattgcgatgccctctctcttaaagaatatcaccagtatacacgaaaatcgggatttcgcaaccggaaatctgtcgctcacagcgcgcgcagcagctgcagccagaggtgcgctgtcgagatgcgcgcagcgccgtccgggacgaccagcggcaggatcagcgtgtcgccgctgctgtcggtgacggtcacggcgccgacctgcgcgcccggctccagaggggcgcacaggtcctcgttgagcgcgatgtccgtctgcggtgcggccgtgcccttgcgcacgacgatggcgtccgtgcccgagagcaccggctgcacgctgtccgtttcggcaaaccgtacgcgcacgggcggaatgaccgtgttggctgcgacggaatagagcgaatagttggcgaaggcgaagttgaggagcgtcgctgcgtcggcgaagcgcgccttggagctctccgcgtgcagcaccacggcaatgtactccacgccgtcgcgctcggcgctggccgacaggcagtgcatggcctgctgggtgtagccggtcttcaggccggtcgcgccggggtaggcgtggatgagcttgttggtgttggcgaggccgaagcggccgtcgcgcacggtgtccatccagatggtggtgtagtcgcggatgcgcggatgggccagcagtgcgcgggacatgcacgcgatgtcgcgcgccgtcgtgtagtggccgggatcgtcggtcagccccgtgcagttgagaaactgcgtgtttcccatgcccagttctttcgcgcggtcgttcatgcgcttggtgaacgcctcctcggaaccggagatgtgctctgccatggcgacggcgcagtcattggcggagttgacggcgatgcacttgagcatctcgtcgacgctcatctgctcgccctctttgagccagatctggctgccgcccatggagctggcttgggcactggcggtcacgatgtcgctcgtatcgagctggccgctgtcgagctgctccatgatgagcagcagcgtcatgatcttcgtcacgctggcgggggacaggtgctcgtcggcatttttctcgtataacaccgtgccggtcgagcgctccatcaggatcgccgacggtgcggatatcttcagctcctcgtccgttggctgctcgagcgccatcgcgggtgtgagcagcagcagcgctgccagcagcagacagatccatcgtttcatatgctcagccctttccgttgatttctccttatcaccctatgccgggggcacgtggaaaagcagtccgagtctccacaatttgcacaggcttttgcacaccgaagcgctcagagcgtgtcaagatacggcgcaccgtgtcgcaaatgtacgaaaagcccggtattaccggcttgacggtgcgggcacatgatagtaaaataaatccgactgatcacagacactggcgggcgctgcgggcgcgatggggggagacggtttatgaagcgatttgatccgaaaaacaaatacctcggctggggcatcacggcgttcggcgtgatcgcgtgctgcattctgttttacatgctgctgcagcacggcaaatccatcggcgatgcgatcagctcgctgctcggcatccttagcccgatcatctggggcctggtgatcgcctacctgctctggccgctgacgaaggtattccagcgcaagctctttgagccgctgctcaaaaagctccgcccgaaaaaaccggtgcgcacctcacttgcgcgcggcctgtccgttgcgctctcgattctggtcgccctgatcatcatcgccgccctcatctggctcatcatcccgcagatctacacgagcgttgagagcatcgtgctcaactcgcaggattactatgacacgatcaccggctggatcaacaagttctttgagaacaatcccgaggtagaggaagtgcttctctccgcgaccggcgatgtgtccgacaatctgcttgactgggcgaagactgcgctgctgccgtccatgggcaaggtggtcacgagtgtgacgaccggcatctatgccgttttgcgtgcgatcctcgatgtgctcatcggcttcgtcgtcgcctgctatgtgctgtcgaatatggagctgtttctcgcaaagtccaagatggtgctctacagcatgttttccgtcaaggcgtccaagcgcatcctcaaggccattcgcttcacggacacggcgttcatgggctttatcagcggcaaggtcattgattccgccatcatcggcgtcatctgctatatctgctgtgcgatcatgcgcatgccgtatgtcgtgctcgtgagcgtgatcgtcgccgtgacgaatatcatccccgtgttcggcccgttcatcggcgcggtgccgacggcgctgatcattctgctcgtctcgccgatgaagtgcctgatctacgtcatcttcatcatcgtcctgcagcagatcgacggcaacatcatcggaccgaagatccttggcaactccaccggcatcaacggtttctggatcatgttcgccatcctgctcggcggcggcctgttcggctttatcggcatgctgctgggcgtgccggtgttcgtcgtgatctatgccggcctggagcggctggtcgatcacgggctgaaaaaacgcggcctccagacggagaccgcagaatatatggatctggattacatcgacgatgctacgatgcagccggtgcgcctaccgcaggaggtgccggacgaatcgctcaaggattcaaaggatgattcagtgaagtgacgggaagagggactgctttgcatcccgcagtgcatcgcacagcgcgtcgatgtcttcccgcgtggtgtagcgcgaaaagctgatgcgcagcgcgccgtcgatcacgttcgccggcagcccgatcgcctcgagtacatggctccgcccgccctttttgcaggcggagctttttgatgtgtagatcccgcgcgcctcgaggaagttcatcagcacctcgctccggtagccgggcagagaaatgctgaggatgtgcggcgagccgccgccgatgacgacaagaccgtccacctcggctgtcagccggtcgatggcgtgggcgcgcagctcggccatggttttcgtggcctgcgccattttcgcactgccgatctcggctgccgtaccaaaggcggcgatctgcggcgtggcctccgtaccggcgcgcatgccgcgctcctgcccgccgccgaggatatagggcggcagcttcagtccgctgcggatgtagagcgcgccgatgcctttcggcgcgtggatcttgtgaccgctgatggtgatcatgtccgcgccgagtgttttggccgagaacggcactttcaaaaacccctgcacggcatccgtgtgcagcagggcaatgctgttttccgctttcagcatccgggcgacggcggcgatgtcgttgacggcgccggtctcgttgttgaccatcatgagcgagacgaggatcgtgtccggccgcagcgccgcgcgcaccgcctcgagcgggatggcgccggtgccgtccggctgcaggcgcgtgatctcgtagccctccttttccagaaagtccagcgacttgcgcaccgcgtcgtgctccacggcggagctgatgatgtgtttgccgcggcggcgcatgtaccgcgctccggagatgagcgcccagttgtcgccctcggagccgcaggacgtgaaatacacctcgtccggctggcaaccgagcgcttttgcgatctggccgcgcgccttgtccacggcggccttggcctcacggccgagcttgtaggtcgtgctcgggttgccgaagcactccgtcatcatatgtactgccgcctccgctgcctccgggcagacacgggtcgttgcggcattgtccagataaaccatgatcacttacctcgatttggagatgtttttatgcactatattataaccgccctcggctgcaaggtcaaccagtatgaagcgcaggcaatcgaaacgctcctgcacgcgcacggcttcacggccgcagcggacggtgagccggtcgatctgatcgtcgtcaacacctgcgccgtcacggcggagggcgggcgcaagtcgcgccagatgatccgcaagctgcgcgaggagcacccgcaggcgctgtgcgccgtgtgcggctgctggtcgcagctcagcccggaggacgcggcgtccatcggcgccgacgtggtacatggcagcggcagcaagcaggcatttgtggatgacattctgcgtgcgttccgtgagcacgcgcccgtcacgtgcgtggataatccgttccagcgctttgactttgagccgctgccggcgggcgcggcctacggccgcacgcgcgcgatgctgaagatccaggacggctgcaataatttctgcacctactgtgtcatcccgtatacgcgcggccgcatccgcagtctgccgctggaggaaatggcgcgtcaggcggcgcatctggccgccgagggctatcgggagctggtgctgaccggcatcgagatcgcgtcctacggccgggatctgccgggtaagctgacgctggccgacgccgtggagacggtcgccgccgccgcgccgcagatgcgtctgcgcctcggctcgatcgagccgacggtcatcacggaggacttctgccgccgcgccgccgcgaccgggcaggtctgccggcatttccatctctcgctgcaaagcggatgcgaccgcacgctcgcgcgcatgaaccgcaaatataatactgcagagtttctcgcctgcgtcgagcggctgcggcggtatttcccgggctgtgcgctcacggcggacatgatcacgggcttccccggcgagacggaggcagatcaggcggccgcagtggcgtttttggagcaggtcggctttgcggccgtgcatgttttcccgtactcccgccgccctggcacgaaggcggacgccatgccggagcagctcagccacgcggtcaaatcggcgcgcgcgcatgaggcacagcgcgtggccgatgcctgcaagcagcgctatctggtgcagcaggtcggccagacgctgcccgttttgttcgagacggagcatgacggcagctgggtcggacactcggacaactattgtctggtgcgcgctgcgggggacgatctgcgcggacttgtgaaaaatgtcaaaatctctgccgtttccgggcaaatgcttgtgggggatttggtttgacgcgctttgcggaacgtgttagacttttctcaatccatgcagaatgtgctgtatgcgatgaattttgacccctggaggcgatttccgtgacccgaagtgaaacgttcaatttttctgctggaccgtcggtcctgccggaggaagtgctcaggcaggcgcaggcggaattgctcaattatcatggcacgggtatgtccgtgatggagatgagtcaccgaagtcaggctttttcggatatcttccaggatgtgaaggcgcgttttcgcgccgcactgtctgtgccggacacacatgagatcctgtttttgcagggcggcggcacggcgcagttttccatgatcccgctcaatctgatgggcgagcaggggacggcggactatgccgtgaccgggcatttttccggcaacgcggccaaagaggccgagaaatacggcgcggtgcacattgcggcggacacctccacctgcggccatacccgtatcccgcagcagagcgagctgaggctcgatgcgcgcgcgtcctatttttattattgcgccaacaatacgatctacggcaccgaatggcagtacgtgccggagaccggccgcgtgccgctcgcgtgcgacatgtcgtcggacattctctcgcgcccggtcgatgtgtcaaaatacggcgtgatcttcgccggcgcgcagaaaaacatggcccctgcgggcctgacggttgcgatcgttgaccgcagtctcgccgggcatgagctgcccatcacaccggtcatgtacagctatcagcgcatgatcgacaaggactctatgtacaacaccccgccgtgctggtgcatttacatcctcggtctcgtgctcgcgtggctggagcggcagggcggcgtggagggcatgcagcagctcaagcatgcgcgcgccgcaaaggtgtacgattttctcgacaacagcgcgctgtttcatccctgtgcgcagccgggctcccgctcggatatgaacgtcacgttccgcaccggggacgatgcgctcgacaaggaattcatcagcggcgcggcggcgcgcggcctgctgaatctcaagggccaccgcgttgccggcggcatgcgcgcctcgctttataacgccatgccgatggcgggcgtggatgcgctcgtggattatctgaaacagtttgaggtagaacatcatgtataaaatcaaaaccatgaaccatatatccccctatggcctgcagaagctcgaagagcgcggctgcgtcgtcggggaggacatacaggcaccagatggcctgatcctgcgctcggccgacctgcacagctatgcctttgagccgagcctgatcgccatcgcgcgctccggcgccggcacgaacaacatcccgctcgaggattgctgccgccgcggcatcgtcgtgttcaactcgcccggcgcaaacgccgaggcggtcaaggagcagatcctctgctcgctcgtactctcgtcgcgcgatgtgctcggcagcattgactgggtcaaggggctcaacggccggggcaaggacatccccgcgctcgttgaaaagggcaaatcgcagtttgcaggccccgagcttatgggcaagacgctgggcgtcatcggccttggcgcgatcggcgcgctcatcgccaacgctgccgtgagcctcggcatgaatgtctgcggatatgatccgtacctgtccgtggacgcggcgtggcggctctcgcgcgatgtcaagcacgaggtgaacctcgacggcatctatgccaaggcggattatatcagcatcaacgtgccgtacacggaccagacgttccatatgcttgatgccagggcgttttccaagatgaaggacggcgtgcgcatcatcaacgagtcgcgcgccgagatcgtggatgacgacgccatgctcgccgccattgcctccggccgcgtcggcaagtatgtcacggactttcccaacgaaaaggtcgtcggcgtcgacaatatcatcgcgctgccgcatctgggcgcctgcacgccggagagcgaggagaagtccgccgtcatggccgcgcgcgagctctacgattatctcgccaacggcaacatcaaaaactccgtcaacttcccggacgcgacgctcgagcgcatgggcgtcagccgtgtgtgcatcctgcaccagaacgtgccgacgatgctcaaccagttcctggagatcacctgcagcacgggcctgaacgtcgagaacatgatcaacaaggcttacggcgcatacgcctatgccatgattgatctcaacggccgcctcgatgacgatcaggtggcaaagattgaccgcataccggaggtcattcgcgtgcgcgtggtgtaaaaacgagaaaaacagccgctcccgatcgggagcggctgttttgcgtatggagtggatttatttctgcttttttgccagcgcggcctcggagaaatcgcggatctgcggcactttgctcagcgcaaagtacagcgccagaccgcccacgatgccgacggcggcctgcgcggcgttgcccgggatctctgccgccgcggctgcgccatagccgagaatgaaatcctcaaacacaaagtagcccagcaccatgatgatctcgccgcagatggcgctcagcagcgcgaagccaaaggactttttgcggcaggcgcggaagatcagcgccgtgaccacggccgcacaccctttgacgacgagcgtgccgggcgcgtagctcatgtagccggagatcacatccgccagaccggagccgaaaccggcagccacgccgccgtagagcgggccagccagcagggcggcgagtacgaccacgatgtcgccggcgttgagatagccgccggtcacggtcgggatcttgatgacgagcgtcgccacgcagcacagcgccatgagcatggcggtgtagacgagatttctgagtttctggttcataattatcacctttttatgttattggcacaagaatacgatattcgacacaaataagcaagggttgagaacaacgaaaattcctgctatactgctatgagaaatgggggatttgaccatgaccaggaaattatatgatctcgacagtcaccggcgtgatttttctgcgaccgtgctgcgctgcgacccggacggggcgcgctatgccgtcgtgctcgatcagacggtgtttttcccggagggcggcggtcagccggccgataccggtgcgctcggcggcgcgcgcgttctggacgtgcagctgctgccggatgcgatcgtgcactatacggacgcgccgctcgcacccggtgcgcaggtgcgcggccagatcgactggccgcagcgcttccggcgcatgcagggccactcgggcgagcacattatctccgggctgatccataaggaatacggatttgacaacgttggcttccaccttggggaagacgcgatcacgatggattatagcggcgagctcacatggacgcagctcatgcacatcgagcagctggcaaatgaggcagtgtaccgcaatgtgccgatctggacagagtacccggcaccggagcagctggcgcacatggagtaccgcagcaagctcgacctgaaagaggatatacgcattgtcaccgtcgagggctatgatgtctgcgcctgctgcgcgccgcacgtgtcgcacacgggcgagatcggcgcgatcaagttcacgtcgctcatgcgccaccgcggcggtgtgcgcgtgacgattttgtgcgggtcggacgcggaggcggactatcgggaaaagagcgcgcaggtcgcggcgctctcggcgcagctgtccgtgcggcaggcggatgtcgtcccggccgtgcagcgcctgctcgatgagatcgcgcagcgcaaggccgcggccgcggagctggagcgccgcctcaacgcgcagcggctgcagctgctgcgggagacgcccggcagtatctgcgtcatcgaccgctttgacgatccggtcgccatgcgcgaattcgtcaatgccggcatgctgcttgccggcggcgtctgcgccgcctttaccggcagcgatgcggacggctaccgctatatcatcggcagctgcacggtcgatctgcgcacggaggcaaagaccatcaatgccgccatctccggccgcggcggcggaaagcccaccatgatccagggctcgtgcacggccccggccgccgcgatcgaggcgtttttcgccgcctatcctaggaaataatatagatgcagataggaaacagggccgcggaattccgcggccctgcttttttcggttttgctcagattactgcatgccgttttcgtaggcggcgatcatctttttgaccatctggccgccgatgctgccggcctgacgggacgtcagatcaccgttgtaaccctgcttgaggttcacgcccacctcggacgcggcttccatcttgaagcggttcatcgcctcacgcgcattggggttgacaaggttgttgctgttggaagtagccatttcgttttccatctccttttcgtgttttgggtttcttgacccgctactattttctgcggacagaatggaagtatgcagagcagaaaaatgcaatttttgcaagcttttttgtcgctgtttgcctttcttgccggctgtttccggcgcgcggggatgtgcgccatccggttgcgatgattgcattttccattctgccttggcggacggcccgcggcaacggggactgcggtctatgcagtgttcacaaagcgcaacttgacacgaacgggatatcggtataatatttagaatgctattttggcattttgtacgtatttgcacaatgtcggcatagaattgcgataacgatgatttttcaaaataataaggagaactgactatgtgtggaatcgttggatacgtcggcgcgcagcaggctgcgccgatccttctcgaagggctgcagaagctcgaataccgcggttatgactcggccggcatcgccgtgctcgacggcagcacgatcgagcttgccaaggcctgcggcgagatcaagaatctgctggccaaaacgcatgacggtagcgatcttcacggctatattggcctcggccatacgcgctgggccacgcacggcgcgccgacggaggcgaacgcccatccgcacgtgagcaacgacggcaagttcgccatcgtgcaaaacggcatcatcgaaaacttcatggagctgcgcgagatgctgcaggccaaggggttccggttccatagtgagacggacacggaggtcatcgtccatctgctggatatgtactacaccggtgacggcaacctgaaggacactgtcatgaagacacttggccgtctggagggcagctatgcgatcggcattctgtgcgccgactgcccggagcagatgttcctcgcgcgcaacggctgtccgctgatcatcggcgtcggcgcgggtgagaacttcttcgcctccgacgtgacggcgcttgtgtcgcacacgaaaaatgtggtctatcttgacgacggcgagctcgccgaggtgcgcgccgacggttataccgtctttgactgcaccggaaagcccgtgcacaagcctgtctcccgcgtcgcgtgggacatcgaggctgccgagaagggcggctatgagcatttcatgctcaaagagatcatggagcagccgcgtgccatcaagtccacgctcgacccgcgtgtgaaggatcaccgcgtcgtgtttgacgagctgaagatgaccgacgagcagctcatgggcttcaacaagatcatgatcacggcctgcggctcggcgttttatgccggccaggcgggcaaatatgcgctcgaaaagctcacgcacatcccggtcgatgccgaccttgcaagtgagttccgctaccgtgacccgatcgtcgacgagcacacgctcatgatcatcatttcgcagtccggcgagacggcggacaccatcgccgccatccgcgaggcgcagtccaagggggcttatgtgctctcgatcgtcaacgtcgtcggcagtacgatcgctcgcatctcggacgatgtcatctacacctgggcaggtccggagatcgccgttgcgaccacgaagggctacaccacgcaggtgtcggtgttgtatctgctggcgctctatctgggcgagaagcgcggctgcctgagcagggaagaggcggcaaagctcacggacgacctcatgatcctgccacagatggtgcagcgcgccatcgacctcaacccgcagatcgcgcagctggccgagcggtacaaaaacaatccgtccctgttcttcatcggccgcaatgtggactacgctgtctgcatggagggctcgctgaagctcaaggagatctcctacctgcactcggaggcctatgccgcgggcgagctcaagcacggcacgattgcgctcattgaggagaatcgcctcgtcatcgccgttgcgtgctacgagccgctgtttgacaagaccatgagcaacgtcaaagaggtcaaggcgcgcggtgcgcgcgtgcttggtgtggcgctcgagggcaatcgcgccatctattccgaggcggacgatgtgatcctcgtaccgcgcatggacgacctgttcgtcgtcccggcggagatcgtgccgctgcagctctttgcatattatgtcgcaaaagccaacggctgcgcgatcgataagccgaaaaacctcgcgaaatccgttaccgtcgaataaggagagcgtcatccatgccgaatcagtctgtcatcgtcctcgatttcggaggacagtataaccagcttattgcgcgccgcgtgcgcgagtgcaatgtctattgcgaagtcaagccgaacaccatgaccgtggatgagatccgcgcctttgaccccatcggcatcatcttcaccggcggcccgcagagcgtgtacgccgaaggttcgccgcaggttgatccggagatctttcggctcggcatccccatcctcggtatttgctacggctgccagctcatggcgcagtatctcggtggggaagtaaccgccgccgggaaggacaccgcgcgcgagtacggcaagacggagacatggtttgacaccgattgccgtctgttccgcggcctgccggagcagagcattacgtggatgagtcacggggactatatggccaaggtgccggattcgttccggcttgtggcgcattcggatgcctgcccgacggtcggtatctgcgatgaagcgcgcggcttctacggcgtgcagttccaccccgaggtcaaccacaccgagtacggacaggccatgctgcgcaacttcctgtatgaggtctgcggcgcgaccggcgactggacgatgggcgacttcatgcgcaagtccattgaggacatccgcgccaaggtcggcgacggcaaggtgcttctggcactttccggcggtgtggattcttcggtcgcggccgcgctgctggcggaggcggtcggcaatcagctcacgtgcatttttgtcgatcacggtctgctgcgcaagaacgagggcgacgaggtcgaggctgcgttccagaattgggacatcaacttcgtgcgcgtcaacgcggaagagcgtttcctcacgcgcctgaaggacgtctccgatccggagacgaagcgcaagatcatcggcgaggagttcatccgcgtctttgaggaagagggcaagaagatcggctcggtcgactatctggctcagggtacgatctatcccgacgtgatcgaatccggcacgaatgtcgctgccgtcatcaagagccaccacaacgtcggcggtctgccggactttgtggacttcaaggagattattgagccgctgcgtctgctgtttaaggacgaggtgcgcgcgctcggccgtgagctcggcctgccggagtatctggtcatgcgccagccgttcccgggcccgggtctggccatccgctgtctcggtgcggtgtccaaggacaagctggacatcctgcgcgacgcggacttcatcttccgcgacgagatcgccaaggcgcacctggagcagacgatgaatcagtacttcgcggtgctgacgaatatgcgctctgtcggtgttatgggcgacggccgcacgtatgactatacgctcgcgctgcgcagtgtcacgacgacggacttcatgactgccaactggacgcgcatcccgtatgatgtgctcgaccgcgtctccgtgcgcatcgtcaacgaggtcaagggcatcaaccgcatcgtctatgatattacgtccaaaccgcccgccacgatcgagtgggaataattccagaggtcgaaaaaagcctgtaaatactggactttttaagccttgaagcccctcgcggcagcgatttggcaacagaattttatgattcataagaaaagagctatctgacttcatttgaaatcagatagctcttttttgttatacgccaatgacaatgaattcttcgttctctccgatttcttctgtgacccaacggtctgtagcagatatcgtttccttagcatcacttacaaattcggggagaacggtttctggaatgttcagctgcatcatttttcaccattctcctcttgtaacactagtatcttcaaacatatcgaatgacacagagactttttgaaatgcgcttgccaggaaaaagtaaaacgcgttgtccagtacatacagtgaatcttgtcgaagaaacttcctgctggcaccagaatttccctttctgaatttgaggtaatcactgccgctgaattctccgagcttataaacatatttattcatgtatcatttcctcaagcagcagattgttcagtccctgtggcggcgtgattttacgtcactgactgaaagcgccatggtattgcatgcacagattcaggcggtagccgtatgctgcaagtcacagagcatcccgctgttcggccggcatgcggtattccggtttgacgtggtaggcgacctcggcatactgccgcgcacgtgcgcgcagcgagaagttgcccttttgactgcaccagacatagagctcatggcagaccagatccgtcgcgatgcgcgacagcagatccggcggctcttccgtgtcgataatgcccgccttggcgcagttattggccagcgttgcaaacagatcgtccagcgcatggatggccgtgcggatgccttcgggcgactcgaactgcatgatgaagagtgtgctcgtcagttccgggccgaagtcgtaagcgatcgtgatgaaccggtcgaacagctgccagatgcgctcaaagtcattatctgcgtgcgcaaacttcatgaagctcttgtcgtcattgtgctgcggtttttccaccatgtattcgaggatgctgcgtttgccgttgaaagaggagtaaaagacggagcgggagataccgcatgccttgcagatgtcgttgacggtcacgttgttatatccgtcgcgcttaaagagggaaatggctgtttccgcgacttcctctttgaatttccaggaagaatcttgcacttcaaacacccctgacgaaaaatgtttgctttcttcaaacattatacgacttttgtttctgtgattcaacacacataagattttattcgcaattcttttacaacttttttgtgacttgtttcaaaaatgccctggaggccttgacattgcagggttaataaattaacatggcgacgctggaagctgttcaagtgtccgaacggcccgtcgttatttggatgtaaactatcagagaaggaagcgagaacatgacaaaagacgagaaaattgcaaagctcggcaaagaaatcacggatcgcgcaacggtcctgctcggcaaggacaagatcacgccggatgccccggagtatctgggcatcaactccgccctgaagttcacggcggtgaagtatgatgagaagatggcggacgatatcctcgatatcgccctgacgatgaaaaagcgcgtgccgctcacgatcgagcagctcgcaaagaaaaacccgcagttcgacagagcctatctggaaaaagcgatgcaggctatcagcgagagcggtctggtcgagttccattgggagaacctcgacggcaagaacccgaaccatgagaaacgctgggtgctggacatgttcgtccccggcagtgccgagatcatgatgatcaatcccgagcaggcggacatgttcccggagacggcagacttcttcgagcgcatggcgtatctgccgctggcgggcatcaccgagatggtgcctcccggaggcgccggcatcggcatgcacgtcatcccggtcgaaaaggccatcccggccgagagcaagtctctgccgatcgagcacctgtcccactggctgaagaagtacgagggccacatcggcgtgtccgtgtgctcctgccgcaagcagcagcgcatccgcggcgagggctccggcgacgtggaaggcgagtggtgcatcggcgtcggcgacttcgccgactactgccgcgagacgaaccacggccacgacatcacctatgaagaggccatggagatcctccagaaggccgaggaccgcggctatgtccaccagatcacgaacatcgacggtgagaacaagatcttcggcatctgcaactgcgccgtcggcgtctgcaacgcgctgcgcacttcgcagctgttcaacacgccgaacctgtccgcctccgcctacgtggccgagagcgacccggaaaagtgcgttgcctgcggcaagtgcgtagagacctgcccggctggtgctgtccgcctcggtcagaagctctgcacgaaggaaggccccatccagtatccgcaccatgagctgccggacgacaccaagtggggcgaggatcactggaacaagaattaccgcaacgagaacggatgcatccagacctggccgaccggcacggcgccctgcaaggctgcctgcccggcacacatcgccatccagggctacatcaagatggcgggcgacggccgctatgccgacgcgctcaagctcatcaagaaggataacccgttcccggctgtctgcggtagcatctgcagaaagtactgcgaggatgcctgcacccgcggcaccgtcgacgagccgctggccatcgacgagatcaaaaagttcatcgccgagcaggacatgaaggccgagcaccgctacgtgccgcccatgaactcctgcacacacgagaaacttgaccagaagatcgccatcatcggcggcggcccggccggtatgtcctgcgcctacttcctggccattgagggctacagcccggtcgtgttcgagaaggaagccgtgcctggcggtatgctcgtcaacggtatcccgagcttccgcatcggcaaggacgtggtcaagtccgagatcgatgtgctgcgcgagatgggcgtggagttcaaatgcggcgtcgaagtcggcaaggacatcaccatccagcagctgcgcgaagagggctaccaggcgttctacgtcgcggtcggcctgcagcaggcggcgaagctcaacatcgccggcgaggatctcaaaggcgtcaagagcggtctcgacttcctgcgtgaagtcaacgccggcaagctcaagaagctcacgggcgatgtggtcgtcatcggcggcggcaacgcggccatcgacgtggcgcgcgcggccctgcgtctgaccaagggcagcgtgaacatgtactgcctcgagaaggacgaagagatgcccaccgttccggacgagaagaacgccggcatcgccgacggcgtcgtcatcaacaactcctgggcgccgaaggccatcctcggcgggggcggcaaggtcaccggcatcgagctgatgcgctgcgtgtccgtccgcgacgcgagcggcaagtttgctccggtctatgacgagaatgagaccatcaccgtcccgtgctccaacgttctggtcgccatcggccagcgctcggtctacggcgacgttctggccggcaccgcggcggagacggctgacggccgcctgatcgcacacgacgccgtgacgttccagtccaacgagcccgatatcttcgtcggcggcgactgcgccaccggcccgaagtacacgatcgacgcgatcgcgaccggccgcgagggcgcggtgtccatccaccgcttcgtcaacaagggccagaccctgacgatccaccgcaacacccgcgagttcaaggagctcaacaaagacgatatcgttctgccgaccgagaagatcaaaaagcccgcgcgtgccgccgttgccatcgacagcaagaaggtgcgcaccatgcaggacgaccgcgtgacgttcaccgaagagcagatccgctccgaggcgtcccgctgcctgagctgcggccgcagcgtcgtcgatccgaacaagtgcatcggctgcggcatctgcacgaccaagtgcgaattcgacgccatccacctcaagcgcgtgcgtccgcaaaacagcaagatgatcccggccgaggacaagttcaaggccatcgtcccctacgccgccaagcgtcaggtgaagatcatcaagaagtctctggcggaaaagaaaaagtaatccatcattatgaggcgggcacagaacccttcccgctgtgcccgcccgcttgaaaggagcccccatgcacgagctgagtatcgttacttatgtcgtcaagcaggtgcaggagatcgccaaggaaaacaacctcaccgagatcgagtcggtcacgctcgaattcggtgaggtctccggcattgtgccggaatatctcgaggactgctggaactggtataccaagaaggagccgatcattcagggcacgaaattcctgtatgagatcattccggccgtcacctggtgcgacgactgtaagaccacttacccgaccgtacaatacggcaagacctgcccgcactgcggcagcggcaacacctggctgcagcagggcaatgagatcaatatcaaacagatcgaggcgcgttgattccggcacgcctccctgcctatgggcagcaaaagagacagaagcggtcgcgcagccgcttttgatagaaacacgaacgaagagggagtgaaccatgaaagacctgaaacatcttttgtacttcgaaaaccttttgcaggaagcgcacaatgacctgattgctcaggcgcagaacgaggggaagatctgcgttgcctatgcctgcgaaaacacgcctgagccgctgttgaacctgcccggctcgttctcaacgcgcctgcgcgcgccgcgcaccggctctatggaaatggccacatattatatgaccagcttcctgtgcgagtacagccgcgcgctgctcgagcgcgccattgaaggcggctacaactttgccgactgcatgattacgccggacggctgctcgatgatgaaccgcgccgtggagaacatggagctgctcaagaccatgggcaaggacaagccgaagttcttcttcgagtacatggagatcccaatgaaggcggacgacaacggcctgaacctgtacgtcctgcagtgccgcaaccatatcctcacgccgctgcacgatgtctatggcatcgacgtctcggatgaggccatccgcaagtctgtcgccgagcacaaccgcgtgtgcgagctcatccgcgccatcggcgagtaccgcaagggccccaatccgcgcatcacgggctacgaattccacgtcatcacgcttgcgacctatgtcgcgccgaagtatctgctcatcgacaaactcgaggagacgctcaaggagctcaagacccgccgcccggacaagaagaccccctaccgcgcgcgtgtggtcgtcgtcggctctgaggtcgatgacattgacttcatcaagctcgtcgaggagaccggtgcgtacgtctgcgccgaccgcttctgctacggctcgttcccgggccgcgacccgatcgtgctgacggacgatgaggacgcgctgacccagatctgccgccagtacatgaaccgcgcccagtgcccgcgctatatgaacatgcccaagatgatcggccgccgcgaatacgtcaatcagctcgccaaggagtacgaggccgacggcatcatttacgagcagatcaagttctgcgatccatgggcgtatgagcgcatgctcggctcgcacatcctcaacgatgactacggctatcccgttttgtccgttgaccgcccgtataacatcgcttcctccggccagatgcgcacccgtgtgcaggcattcgtggaaagcatggagatcaagaagattcaaggggggaaacagtgatgtccaacaagagaatcggctgtgaaaacttcggtaagttctataccgagggcaaggtccgcaaccgccgcgagtggcgcggcgtgaccgacactctctatgattattcccgctggctgcacaactggatcaccatggcgaagatggtctccaagccgcgcaacatcaaggccatgttccgctatcgctggatggccaactatctggccgtgcccatgatggtcgaccgccacacccagggcctgcgcgatgaatatctgcgcatctgccacctggagcaggatcttatcatcgaggacgtggcaaagctgctcgacggtctcttccgcggcgaccgccgcatcggcaaggacaagaaattctccgacaaggtcgtgctcgtggacgaaaacgagatgaccgccgtcatgatgggcttcccgacgctcaagggcctgagccgtgagacgccgtcgacctatgtctccgtgctgctcaaccagcacgcagccgagcattatatcgacgtcgcgcaggagtacggcctcgcgggcgatgtctgcccgatgccggaggcggaggccggtgtgtccatcgacgacgacgcgccggtgctcggcgcgtgcgccgtgcagtgcaacacgacgtgcgacggctctctgctcggaaacggcgtcatttccaagcgcctcgagcttgaggacggcattccggtgttccagctggcagcgcccctgcgccaccgcgaggacgacgtgcaggattacgccgcgcaggagatcaaaaatgccatcgccttcatcgaggagcacaccggcgagaagtgggactggaaggcgtacttcgagtgcgccgagcgcgtgaactacgccaccaagtgccgcctcgagtggctggagatgaacaagaccgactatccgcaggtctttggctccaaccttgcgctgtacacggagacgaactacatggccatctgcggcaaggtccccgcgttccgcgaagtcgatcgcaagatcacgcagctcgccgagcgcgcctaccgcaagcagaagaaggccgccaacgagtaccgccaccgcgccatcgtctggggcgtgcagtcgcacttttacatggacttcctcgtctggctgctcaactgctggggcatcgtgccgctgacggatatgctctccatggtctcaacgcgcgaactcgtcacggaggacacgcccgaaaaccgcgagcaggcgtattacgacatggcctggctgacagagaacatgatcatgcgcaaccgcacccacggcggctacaaggtcctcctcgacgagctctgggagttctgcgagcagttcaacgccgacatggtcatcctctgggagcacatgagctgcaaggcgctcgacggcatgcacggcctgtttgaggagcgcgcccgtgagcacggcatccacctcatctgggtcacgcacgatctgtttgacccgcgcgtggtctcgcgtcagggcgtgcgccagcaggtcaatgattacatgcgcaccgtcatgcaggaagagcctgtggatccgagcctggagatcctgaaggacgacaagtcctggtaatcagagaggagatcgaacatgaacaatctgaaaagcaagctgctcaaggcccttatgggtgtgtcgctcggcgcactcggcgcgtttgtggtcacgtttgtcatctatttctggaacctggacatgaagctgacctccgtcatggagggcatcctgctcaagcactacgacaagattgaccgcgaccagcacctgtaatctttttctgtacagcccgtctgcttcggcaggcgggcttttttcgcatgtaaacaatttgtgacgcctcttgacgataaaaaatattatcgctataatgcgtagcgtgctacacattggaggtgtatcatggagcaatttcaaatcggatgtctattaaaaatgatcacggataagatcaaaatgcgggcagatgccgatctcgcgcagcaggggctgacgctgacgcaaagccgtgtactgggctatctgaaccacaacggcgggcaggcgacgcaaaaggagatcgaaggattcctgcaggtgtcgcacccgacggtggccggcatcatcggccgcatggagcaaaacggctttgtgtactgttggcttgacccgtcagataaacgcagcaagatcgtctgccaaacggagcgcgctgccgcgatcgcgcaggatatgcacgccacgatccaggcaacggagcagcagatgctgcgctcgctgacgccggaacagatcgcggcgctggaatcggccctgcgcacgatctatgccgacctcggctgatcggtccgcgattcaggaaggaggaaatccatgcttcatacattgtcccgcagtctgcgggaaaacaaaggccccgcgctcgtgacggtcctgctctcggcgctggaggtcgtgtttgagatcgtgatcccgctgtatatgtccaacctcatcgacttcggtattgagggcggcagtatggcggcggtctggaagttcggcgcatttttgctgctgctggcggcgttccagctcgcgaccggcgtgctcgcggcgcgtatcgcagcgcgcgcgtccgtcggcttcggcgcgaacctgcgcgaagatatgtacaacaacgtgcagaccttcgcattttccaacatcgacaagttttccactgcgtccatcgtcacgcgcctgacgacggatgtcacgaacgtgcagaacgcctttcagatgctcatgcgtatggcgatccgtgcgccggtcatgctgattttttccatgatcgtgtcgttccgcatcagccgtgatatctccatgacatttctcatcatcctgccgatccttgccgtggcgctgtttttcatcatccgcagcgtgttcccggtcttcacgcgcgttttccgcacatatgacgagctcaataacgtcgtgcaggaaaatgtccgcggtatccgtgtcgtgaagtcctttaatcaggagcagcacgagatccgcaagttcggcgccatttccgagcgcatctataaggacttttccaagggcgagcggctcatcacgctcaacgcgccactgatgcagtcatgtatctacgcgtgcatgatcatcatctcctggctcggtgccaaggccatcatcgccagcggcaatgacccggcgctcggcctgacgaccggcaacctcaccgcgctcatcacctatgctatgcagatcctctcgagcctgatgatgctgtcgatggtctttgccatgctgacgatctcgctctcgtccgcgcgccgcatcgccgaggtgatcgaggaaaagacggacattcaaaatccggagcacccggttatggccgtgcgcgacggcgccattgattttgaccatgtgagttttgtctacgcctccaaggcggacaaaaaggtgctcgatgacattgatctgcacatccgctccggcgagacgatcggcatcatcggcggcacgggcgcgtccaaatcctcgctcgtgcagctcatcccgcgtctgtacgatgtcaccggcggcaggctgacgctcggcggcgtggacgtgcgcgattatgatctggagacgctgcgcaacgccgttgccatggtgctgcagaaaaacgagctgttttccggaacgatcaaggaaaacctccgctggggcaacgaaaacgccacggacgaggagctccgtcacgcctgcgtgctcgcgtgtgcggatgagttcatctccgccatgccggacggttatgacacccatatcgagcagggcggcacgaatgtctccggcggccagaagcagcgcctgtgcatcgcccgcgcgctgctgaaaaagccgaaggtgctcattctcgacgactcgacgagcgccgtcgacacgcgcacggatgcgcagatccagcagtccctttccgcctatatcccggagacgacgaagatcatcatcgcgcagcgcatcagctccgtgcagaacgcggaccgtatcgtcgtgctcgatgacggccacattgacgccgtcggctgccacgatgagctgctgcgcacgtgcgaaatttaccgcgaggtctatgagtcccagcagaagggaggcgaggacgatgcctgaacgcccaaagtttgattcccagacgctcaagcgcctgctgtcgtatatgcgcgcctataagggcacgctcgtgctcgtgacggtctgcatcctgctgagcgcggtcgcaggcgcggcctcgtccatgttcctgcaaaagctgatcgacggctatatcgtgcccatgctcggcacggcgtcgccggactattccggcctgatccgtgcgctgatcaccatcggctgcgtatatcttgtcggtacgctggccacatggctgtataaccgccgcatggtcacgatcgcgcagggcacgctcaagcgcatccgcgacgagatgtttgaaaagatgcagcgcctgcccatccgctactttgacacgcatacgcacggcgacatcatgagcctgtatacgaacgataccgatacgctgcgccagatgatcgcgcagtccatggcgcagctcgtgtcgtccgtgtttacgctgacggtcgtgtttttctgcatgctgtacatcagcatctggctgacgctgatcgtgtgcgccgtcatggcgctcattctcgtgttcgtgcgcaagctcaccggccgcatcggcggctacttcatggcgcagcagacggcgctggccgatctcaacggctatgttgaggagatggtcaacggccagaaggtcgtcaaggtcttctgccacgaggggcagagcaaggcggagctgcgccgccgcaaccgcgtctgggcggaaaacgccgcgcgcgccagcggcatggccaacagcatgatgccgatgatgaacgccgtaggttacctgcagtatgtcatcatcgccgtcatcggcggcacgatggcgattgccggcacgccgaacctcggcctgacgggcatgaacacgctcacgctcggtatgatcgcatccttcctcacgctctcgcgcgggtttacaaacccgatctcgcagatctccaaccagttcaactccatcgtcacagcactggccggcgcatcgcgcattttcgcgttcatggatgccgagccggagacggacgacggctatgtgacgcttgtcaacgccaaggaggaaaacggcacgctcgccgagaccgaccaccacaccggtctctgggcgtggaagcacccgcacggcgacggcacggtcacatacacgaagcttgccgggcgcgtcgtgttcgatcacgtcgacttcggttatacgtcggacaaagaggtcctgcatgacatcacgctctacgccgaacccggccagaaggtcgccttcgtcggcgcgaccggtgcgggcaagacgacgatcacgaaccttatcaaccgcttttacgacattgccgacggcaagatccgctacgacggcatcaacatcaataagatccgtaaggcagatctgcgccgcagcctcggcatcgtgctccaggacgtgaatctctttaccggtacggtcatggaaaatatccgctacggaaatccggacgcgacggatgacgaatgcatcgcggcggcgaagcttgccaatgccgaccatttcatccgcatgctgcccgacggctacaacaccgtgctcaaaggcgacggcagcggcctgagccagggccagcggcagctgctgagcatcgcacgcgcggctgtgtccgatccgccggtcatgatcctcgacgaggcgaccagctccatcgacacccgcacggaggcgctcgtgcagagcggcatggataagctcatggaggggcgcacggtgttcgtcatcgcgcaccggctctcgacggtcaagaatgcggacgtcatcatggtgcttgaccatggccgcatcatcgagcgcggcaaccatgcaaagctcatcgccgaaaagggcgtgtactaccagctctataccggggcgttcgagctcgaataatttcctgcgcccccttgcggccggcaggggggcgcggtataattgcggtaacgaagcaaaggaggagaaccatggagtatcgaagatttggaaacaccatcgtcgcccgcatcgaccgtggggaagaagtgcttgagcaggttgcggccattgcgcaggccgagcagatcaagctcgcgagcgtgcaggcgctcggtgcagtcggggagtttacggtcggcgtgttccacacggccgaaaagcagtaccacgcgaactccttcgcgggcgatttcgagatcgtctcgctgaccggcacgatcaacacgatggacggcgcgttttacacgcacctgcacatgagcgccggtaatgagaagggcgaggtgttcggcggacatctcaaccgcgccgttatcagcgccacctgtgagatggtcatcacggttatcgacggaagagtggatcgttttcacagtgaggagatcggcctgaacctgttccaattctgagcatctgtgtcaaaagcacgcacggctattgagtcgtgcgtgctttttttgctgccttgatcctatattcctattgacaacataggaatataggcatataattcatctcgatgaggtaggattttgtgccggaccatcctgagcctctctgaattcgtgtatacgtatgcagccgtgccgtcaggcacggtttgccattgggaacggaggatacatatatgaacagcaacctgcttgaagtcagcggcctgcacgtgagtgcgggcgagaaagagatcctgcacggcgtggacctgaccgtcggcaaggatgagacgcatgtgctcatggggccgaacggcaccggcaagtccacgcttggctatgcaatcaccggcaatccggagtacacggtcacggccggaaagatcgtctttgacggcgaggatatcacacggctgccggtcaacgagcgcgcgaagaagggcatttttctgtcgtttcagaatccgctcgaggtgcccggcgtgacgctcagcgcgtttatccgcagtgcgctcgagcagaagaccggcaagcgcatccgcctctgggacttcaaaaagaagcttgccgagacgatgcagctgctggcgatggacgcttcctatgctgagcgcgacctgaatgtgggcttttccggcggtgagaaaaagaaagcggagatcctgcagatgctcatgctcgagccgaagcttgccatcctcgacgagacggactccggtctggacgtcgacgcggtgcgcacggtctccaagggcgtgcagctctatcgtgagcgcgtgcacggctcgttgctcatcatcacgcacagcacccgcattctcgaggcgctgacggtggacgccgcgcacatcatggagcagggcgtcattgtgaaaaacggcgatgcatcgcttgtagataccatcaatgaaaacggctttggcggcatccaggcagactgaaagcgaggcgatccgaatgaaggaaaaaagtcaggtcgcggacattgaccgcagtgtctatgacatccgcgacaaagaggacgatgcctatcgtatgcaggagggcctgacgccggagatcatcgaccggctctcgaaggaaaagggcgatccggtctggatgcagcagttccggctgcagtcgctgcagatctataacgagatgccgatcccggactggggcccgtccatcgaggggctggacatggatcacattgcaacatacgtccgtcccaagaccgacatgaaaagcgactggaaggacgtcccgcaggatattaaagacacctttgagcgtctcggcatcccgcaggcggagcgcaaatcgctcgccggcgtcggcgcacagtacgattccgagctcgtgtaccacaacgtccgggacgaagtggctgcacagggcgtcgtctataccgacatggagagcgcgctcaagggcgaatacgccgacatggtgcacaagtacttcatgaagctcgtcacgccgcgcgaccataagtttgcggccctgcacggcgcggtctggtccggtggctcgttcgtgtatgtgccgaagggcgtgcaggtgtccatcccgctgcagtcgtacttccgtctgaacgccaagggtgcgggccagtttgagcacacactcatcattgtcgatgagggcgcgagtctgcattttatcgagggatgctcggcaccgaaatataacgttgcgaacctccacgccggctgcgtggagctgtacgtgaagaagaacgctaagctgcgctactcgaccatcgagaactggtcgaaaaatatgtataacctcaatacaaaacgcgcgctcgtggaagagggcggcgtgatcgagtgggtttccggctcgttcgggtctcatgtcggctgcctgtacccgatgagcgtgctcaaaggcgataactccaagatggaattcaccggcgtcacgtttgccggcgcggggcagaacctcgacaccggtgcgaaggtcgtgcacatcggtaggaacacgagctcgtatatgaacacacgctccatcagcaagagcggcggcatcagcacgttccgcagcagcgtcgtggtgcagaagggcgtcaagcacgcaaaatcctccgtgtcctgccagtcgctgatgctcgattccgagtcccgctccgataccgtcccggccatggacatccgcacgaaggacgctgccgtcggccatgaggccaagatcggcagcatcagcaacgaggcggtgttttatctcatgagccgcggcatgagcgaggaggacgcccgtgcgctgatcgtcagcggctttgcggacaacgtctccaaggagctgccgctggagtacgcggtggaaatgaacaatctcattcgtctcgagatgaagggcagcatcggctgacccacattccgaaaggagggaatatcgtgaatacgagtgaacagctggtcgtcaacaaactgccgaccagaacgtggaaccatctccaggtcaacgaagcgaccatcccgtggaatgtggccgacacggccgatctcgggacggattcatatgcaattacagcggaaaatcaggcgcagccgctgcacatcgacctgaccggtgcgaccggcttcagccgcaagcacatcgcggtcgatgtggccgccggcgtgcaggcaacggtatatatggtgctcgatacgcagggcagcttcgccgtagaaacggcgctgacgctgcacggcaacgcatctctgcgcctagtgcaggtgctcggtgcgcaggacagcgcgctgctctacgccaaaacggacgccgactgtgcgcccggcgccggcgtggacatgacgcagatcctcatgggcaggggcgacctgtattcggacaatgacacggagcttgtcggcgacggcagccattattcggcgcagatcggctatctcggccgcggcagccagacgatcgacgtcaacgtcgtcgtcaaccactacggcaaaaacaccgagtgcgagatcgacacgtccggcgcgctcaaggatgcggcgaaaaaagttttccgcggcacgatcgacttcaagaccggctcgtccaactccgtcggcaacgagaaggagaccgtgctcatgctcggcgacgatgttgtcaacaagacggtgccgctcattctctgcgccgaggaaaatgtcgtcggcaaccacggcgcgaccatcggtgagctcgatgacgagacgctgttttactttgaaagccgcggcatctcccgcgctcaggccgaaaacatcctggcccgcgcatcgatcgagcgctttgcgcgcacggtggatgatgaagtgctgcgcgcgcagattcttcagacgctggaggaggaactcaacgatgacgtatgattataagcgggattttccgatctttcagcacacggacgtcgcctatatcgataacgcggccacggcgcagcgcccgcagtgcgtgctggacgcggtggcggatttctaccgctggcataatgccaaccctctgcgcgggctgtatccgctgagcgtggaggcgaccgatatctatgagcgggcgcgcgagaccgtgcgcgatttcatcggggcacgctcggcgcgtgagatcgtctttacccgcaacacgaccgagagcctgaacctcgtcgcctacagctacggcctgacgcacgtcaaggcgggcgatgaggtgctcgtgtctatcatggagcaccacagcgatctgctgccgtggcagatggtctgccgccagacgggcgcggagctgaagttcatcgagtgcgcgcccgacggcagtgtggatcttcagcaaatcgaatcgctcattaccgagcgcacgaagatcgtcgccatgacgcaggtgtcgaatgttctcggccggaagtacccggtcaaggaagtcgccgccatggcgcacaagaagggcgcggtcatggtcgtggacggcgcgcagagcacgccgcatatgccggtgaatgtgcaggagttgggcgcggatttcttcgccttctccgggcacaaggtctttggccccatgggcatcggcgggctgtacggcagggaggacctgctcgaggaaatgccgccgtttctctccggcggcgagatgatcgaatccgtcacgcgcacgggcgctgtctatgccgagctgccgcataagttcgaggccggcacggtcaatgccgccggcgcggccggtctggctgccgccatccggtacgtgcagagcgtcggctttgacaccatccagcagcgcgagcacgacctgacggccaacgccctcgcgcgcgtgctggccgtgccgcacgtgcacgtgctcggtacggaccgcccggaggatcacaacggcatcatcaccttcacggtcgacggcgtgcacccgcacgacatcagcgagatcatggcgtccgacggcgtgaacatccgcgccggccaccactgcgcgcagccgctgctcgcgcacctcggtctgaacgcgacggcgcgcgccagctttgccttttataacaccgatgaggatgtcgaccggttccttgagagcctctcgaccctgagggagcgtatgggatatggaaaatagaagcttctataatgagatcctgaccgagcacaacatccatccggagttcaagcacgacattccggacgcggacattgagctcgcgggtgtgaacccgagctgcggcgacaacatcgtcctcaagctcaagaccgacggcgatgtcatcaccgatggcggctttgtcggcgacggctgcgccatctcgcaggcgtcggccgatatcatgctcggcatgatcgtggggcagaagaaggaaaaggcgctggaaatgggccgcaccttcctgcgcatgatccacggcgaggcgaccgaggaagagatcgagagtctcgaagaggcctcggctctcaaggacatcgcgcatatgcccgcgcgtgtgaaatgcgccatgctcggctggcgcacgctctcggaggcgctgaccggcaaggtcgaagaataagccgttcccgccgccggcggatgccgatgcggtgtctgccggcggctttctgcacgctggaaatccccggtttgacagcgtgcgcctgtgggattatgataagacatcctcttgacggcaggtgctgtgtatgactgattttgaacccgctcttctgcggcgcatccgtgcgctcgcggctgcgcagccgcgcgtgcttgtcgccatcgacggccgctgcgccgccggaaagaccacgctggccgcgtccctgcaggcacagttggcgtgcaatgtgtttcatatggacgactttttcctccgcccggagcagcgcacgcccgagcgcctgcgtcagcctggcggcaatgtggacttcgagcgtttcctgactgaggtgctccgtccgctgcgcgatggcgcgccggtgacgtatcgcccttatgactgccgaacgcagcagctgtgcgcgccggttcacgcggaggcaaggccggtcaatctcatcgaggggtcctattcctgccatccggcgctgtgggatctttatgacctgcacgtgttcctctcggtcggcccggaggagcagcaccgccgcattgctgcgcgcaatggtgaaaaaatgctgccgatgtttacaaacgtctggattccgatggaggagacgtactttgcgcggtttcaagtcgcggagcgcgccgacctttgccgggaaaattgaatcagcctgcggatgaccgcgcggggcttgtgtcccgcgcggttttgtgctacattaaaagaacatatacgaagtgaatttttacagaaaggcgggagctacatggatgttctgcgtttcaaacaggccaactgcaaaaactgctacaaatgcgtccggttctgcccggtcaagtccatccgcgtctatcagggtcacgcacagatcatttccagcgactgcattctctgcggcaactgcgtgtccgtctgtccgcagcacgccaaggaggacatcagcgacgtcgcgcagatccaggaactgatcgcgtccggccagcaggtcgttgtgagcgtcgattcctcctacatcgcctattttgatactcctggttttgcgggcatcgccgagccgctcaaaaagctcggctttgcagcggcgcacgagacggcggagggcgcctacctggtcaagaaggagctggaaaagctcgctgcccagccgggtgatgcgccaatcattacgtccggctgttcgacgatcgtgctctatgtggaaaagcacctgccggaggcactgccgtatctggccccggtgctctcaccgatgcaggcgcatgccgtgctgctgcgcaagcgctatcccggcgcgaccattgtctatgtcagcccctgcatttccaagaaagaggagacgacgcgctttgagagcgtcggcgccgactatgatattacgttcacggaactcgaggactggatgcacgaggccggcgttgccgtcaaccccaatgtgccggcggatgagccgctgctctcgcgcggctacacgatcacgaacggcgttctgcattccatgtcgctcgattccgggcgcgattatctgttcctcgacggtctggatgacagcattcagacgctcaagagcgtcgtcaacggtgaactgcgcaactgtttcattgaaatcgccgcctgccacggcaactgtgtcggcggccttgctttccggcagaagcacacgaacctgctcgagtcgcgccgccgcgtgatcaagagtgccggcggcggaaaaaactttgacattcaagagccagtggatatgcgccgtgtgctcgtggacaagaagcacccgaccgacctgccgcccgagtccgtcatcaacggcatcctgcgcaagatgggcaaattcagcccggcggatgaactcaactgcggcctgtgcggctatcgcacctgccgcgacaaggccatcgccgtctatgagggccgcgccgagatcagcatgtgcatgccctacatgaaagagcgcgccgagacctattccgagaagatcatcaatgtctcgccggaaggcatcgtcaccgtcggcaagaagctgaaggtcaagcagatcaacaaggctgcctgcaagatcttcggcatcaaggatccggcggacatcatcggatatccggtgtcgcgcatcatggatgagtacgacttcgtgaagatgatcagtcaggacgagacacaggtcacggacgaggtctttctcgctgactacaacgtctatctcgagcgcatctttatctgcgacccggagcggacgctctttacctgcatcatgcgcgacgtgacgaaagcgcgccagcgccgcaacaagatccagaagacgaagatccatgcggccgatctggcggacgatatcattgcaaaccagctgcgcatcgtccacgagattgcaagtctgctcggtgaaacggcagcggagaccaaggtggctgtgcatgatctgaaggaagccatcatgcttgatgaggacggcgatgatgatgcgtaaacgaacgaatcgctgcaggaacacggtctgggacatcagcgtcatcagccgcaacaaaaacggggagacgctctgcggcgatcagtgtgcgctcgaatgggacgacaatgacgcgacggtcatcctctccgacggtctcggcagcggcgtcaaggccaacatcctctccacgctgacaacgaccatgctcacgaccatgctcaagggcaacgtgccgatcgacgagtgcgttacgaccgtggcggaaacgctgcccatgtgcaaggagcgcaagctcgcctatgcgacctttacgatcctgcagacggccggcacccgcgcgcgcctgatccagtatgacaacccgaacgctgtgttcgtgcacaacggcgcgatcgggaaatacaactactccgtcaatttcattcaggaaaaggagctgcacgagagctacctgcattttgacgtgggcgatatgcttgtgctcttcagcgacggcgtgtcggaggccgggcgcggcgtgacgacggacgccggttgggcgcggcaggacattgaggattttatcctgcgcaattattcacccaccgtctcctcacagcgtatggcggccagtatcctctcgaccgtcaagacgctggacatggatgccatgcatgatgatacgactgttgttgtcgcgcgcctgcgtgagcgttgtccggtcaacgtcatgatcggcccgcccgagagcaaggatgatgatctgagcaccatgcggctgtttttcggcaaggatggcaagcatgttgtctgcggcggcaccacggccaacgctgtcgcgtcatatctgggcgtaaaggtgcatacgctgcccggcagtggcacggaggaggtgccgccgatgagcgagatccacggtgtggatctgacgaccgagggcgtcgttacggtcaatgtgacgatgaaacgcatcaaggactacctcgcggatggcatgtacacgctcgagctcgcccacatgaaggacggcgcgtccaagctcgcgctcgtactgctcgaggaggcgacggaggtcaatgtcctcttcggcaacgcgagcaacctcgcccagcaggatacggagttcagctttgagcgcaagctgcaattggtgcaggagctgcgcgatatgctgactctggccggaaaaacagtcaaaatgagcatctgctgacagatgcgaaatcatcacggagtgaccctaacgaatgaaaatccgaactttttttgcagtattgctgtgtaagcttgcacgcgggctgctgcggctgctgcgccgcggtggcacggcgtttcccggccgcgtggcgctcaaggtgtacccgcaggtactcggcgtgctctcgcggggggtgcgcgtcatcctcgtcaccggcacgaacggcaagacgaccagctcgcgcatgatcgagcaggcattcgccgatgcgggcctcaattactttgccaaccgctcgggcgcgaacctcatctccggcatcacggcggagtttgccatgcacagcaccctgaccggcaggccaaagtgccagtttgccgtcattgagtgcgacgaggctgcatccaagaccgtgctcaagtacctcaagccggaggtcatcgtggccacgaacgtgttccgcgaccagctcgaccgctacggtgagatcacgcacacgctcaataacatcatcgagggcatccgccacacgccggagagcgttttgtgcatcaatgccgactgctcactcatcgcgtccatcccggcgcaggtgccgaacccggttgtgcgctttggcgtgaatgtgccgctcggcggtgacgacctgacggagatctccgacgcgccgcactgcatccactgcaagacggaatatgtctacgactaccgcacgtacggccatctcggcgcgttccgctgcccgaagtgcggctaccaccgcgaagccccgcaggtcgccgtcacagcggtgctgaatctcggcgtggacacgagcgatgttaccatggccatcggcggacaggagtacgccgtgcacatcaacctgccggcagcttataacatctacaatgccgtcgggtcggcggctgcgctgtacgcattcggcttcacaccggaggcgatcgtgcacgcgctcggcgcgttcggctgcggctttggccgtatggagaaattcgacctgcgcggtacgcccgggcgcatgatgctcgtgaaaaaccccgcgggcggcaaccagaccatgcgctatctcgccgggctgaacgaggacgcgacgtttgtcgtctgcctcaacgaccgggacgccgacggtacggacatctcgtggatctgggacgcggactttgagcggctcgccgccatgggcgagcatcttcgccacgtgttcgtgtccggcacgcgcgccgacgagctgcgcctgcgcctgaagtatgcgggcgtggacgagacgaaaattcaggtgtattatgactatgacccgctgatcgacgccatgtgcgcgtcggaatacccggtgttcatcatgccgacgtatacgtcgatgctggatctgcgcggccggctgcaaaagcggctcggcggaaaggagttctgggaatgagcgagaagaccctgcgcatctgccacctgtacccggatcttctgaacctctatggcgaccggggcaacattctctgcatgcgccgccgtttggagtggcgcggcatcgacgccgaggtgacggaggtcacggtcggcgagcaggcggattttacgcagtttgacctgtttttcatcggcggcggtcaggactttgagcaggaggtgctcctgtccgacctgaaagccggaaagggcagcgaaatcaaggctgccatcgccgacggcaagacgtttctgaccatctgtggcggctaccagatgctcggcagctactaccgcacgtgggacggcaagcagtgcgactttatcggcgcgatcgactactacaccgtcggctcgaaggagcgtatgatcggcaacttcctctttgagtgcctgccggagtccggcggcagcgcggtcgtcggctttgaaaaccacagcggcaagacctatcttggcagcggcgtgtcgccgctcggcaaggtgctcgtcggcggcggcaacaacggggaggacggctatgagggcgtacgctatcaaaatgtcttcggcacatacagccacggcccggtcctgccgaaaaaccccgcattttgtgaccatttgctcacgacagcgctgcagaagcgctatccgaatctggaactccagccgctggacgatgcggccgagctcgccgcgcacaataccatgcgcgaccggctgctgaaaaaataactgcatggaaaatgggcgcatccgtctggatgcgcccaccgtgcgtctcatattaaaaatccggcgggatcgcaatgtccgcgcgcgggatcttgtcccaggaaaagtccgctgccagctcgattgccgtcaccggcgcgtccgttggccgcagacccgcgagcttggcgagctttccggtcaactgctcgggtgtgtatttctgccgcagggcctccatgttcaggtcgccctcgcgcttggagagcttgcgcccgtccggcgcgacgagcagcggcgcgtgtgcgtattccggggccttgccgccgagcgtttccatcagccagatctgccgcggtgtggagtcgagtaggtcgcgtgcgcgcacaacgcgcgtgatgcccatgtcgagatcgtccacgcttacggcgagctgataggcgaacacgccgtccgagcgccggatgagaaaatcgtcgcgcccgtgccgcagtttggctgcctgcagaccgtagtgcgcgtcaacgaaggcaatgtccgcgtccgtgaccgcaagctttttcgccgcgcgacgacccatgcgcaggcgcttttgcacctcctgctctgacagcgtccgacaggggcagccggcctcgcgcggctcgccggggtgcggtgcgctcgcggccagacgctctgcgcggctgcaatagcaatcatacaccatgccgcgctcggtcaatgcatccagcgcggcggtgtagcgctgtgcgcgcgcgccttgacggcagtcctgcgagccggggcgccagccctcgtcccagtcgagcccaagccagaggaggtcgtcggccatcaggtcagcatagtgctcccagctgcgctccgggtcgagatcctcaaggcggaacaccatcgtcccgccgcgtgcgcgcacgtccagccatgcaagcagaaatgtcagcatattgcccaggtgcagccgcccgctcgggctgggtgcgaagcggccgcggatcgtgttatccggcatcggtcatccctccggtttcatactgagcgtattatagcataaccgcgccggttggcaacgcttttgcgccaaatcccttgaaactatgcgggaaatcggatataataaagtgttattatcagcggaggaatgtctcatggcgaaatcatccatcgaaaaaacaaatgtcatgcgtctgctcgaccagaagaaggtgccctacacgccgcacacatatccgcacggcgacgatgcggtggacggcgtgaccgtcgcacagatgacgggcatggacccggcgaaggtgttcaagacgctggttgcccgcggcgcgagcaagacgccgtacgtgttcgtcattccggtcgcgtgcgagctcgacctcaagaaagcggcgaaggccgtgggggagaagtccattgccatgctgcacgtgtccgagctcacgcccctgacgggctatgtgcgcggcggctgctcgccggtcggcatgaaaaagcagctgcgcacggtctttgcttctcaggcgctcgcgcaggagaccatccttgtcagtgccggcaagatcggctatcaggtcgaggtcgcgccgcaggcgctcatcgcgctcgtgcgtgcgggcacggcggagctgaccatagaatcctaagcaaccacggaggcacccatgcgggatcatattgtaatcaaaggcgcgcgggagaacaatctcaagaacattgatgtggaaattccgcgcgatgcactggtcgtcatgaccggcctgtccggctcgggcaagtcgagccttgcgttcgacaccatctttgccgagggacagcggcgctatatggagagcctctcgtcgtatgcgcgccagtttctcggccagatggacaagccggacgtcgattccatagagggcatgagcccggccatttccatcgaccagaagaccaccagcaaaaatccgcgctcgaccgtcggcacggtcacggagatctacgactatctgcgtctgctctgggcgcgtgtcggcgtgccgcactgcccgaagtgcggcaaggagatccgccgccagacggtcgaccagatcgtcgatcagatcgcggcgctgccgcaggcgacgcgcgtgcagatcttggcgccggtcgttcgcgccagaaagggcgaacaccagaaggtgttcgacgatgcccgccgcggcgggtatgtccgcgtgcgcgtggacggcagcatctacgaccttacggagacgatcacgctcgataaaaaccgcaagcacaatatcgagatcgtggtcgaccgcgttgtcatccgccccgaccagaaccgccgcctgaccgacgccgtggagatcgcgtccgcgctctccggtggtctcgtgctggcagacatcccggaggaaaagcgcgagatcctcttctcgcagaactacgcctgcgacgactgcggcatctcgatcgaggagctcacgccgcggatgttctcgttcaacagcccctacggcgcctgcccgacctgcggcggccttggcacgcggctgcgcatcgacccggcgctcatcattccggacccgtcgaagtccatcctcgacggcggcatcaccgcgagcggctggaacggcgtcaaagatgagagcatcagccggatgtattacgacgcactggcggaaaaatatcactttgaccttgcaacgcccatcggcgacctgccggagcacgtgcgcgagatcctgctctatggcacgggggatgaagagctcaccctgcattatgataccaaccgcggttccggcgtgctgcgccgcccgtttgagggcatcgtctgcaaccttgagcgccgctatcaggagacgcagagcgatgccatgcgtgcatcgctcgaggactgcatggcagagacggcctgcccggactgccacggcgcgcggctgcggccggaggtgctggccgtcacggtcggcgggctgaatatctcggagttcactgcactgccgatcacggaggaactggcgtttctcgaccggctcacgctcagcgagaaggatgcgcagatcgccgacagtattttgcgcgaggtgcactcgcgcctgcattttctgcagagcgtcggattgcagtacctgacgctcgcgcgctcggcggccacgctgtccggcggcgagagccagcgcatccggctcgcaacacagatcggctcgtcgctcatgggcgtgctgtatattctggatgagccgtccatcggtctgcaccagcgcgacaatgaaaagctgctggccacgctgcgcgagctgcgtgatctcggcaacacgctcctcgtcgtcgagcacgacgaggacaccatgcgtgcggcagattatctcatcgacatcggcccgggtgcgggtgtgcacggcggggaagtggtctgtgccggtacgccggaggaggtcgcgcgctgcgagcgctccatcaccgggcagtatctgtccggcaaaaagaagatccccgtgcccgcgcagcgccgcaccggaaacggtcacgcgctcgtgatccgcggtgcgaccgagcacaacctcaagcacgtggacgtgcagatcccgctcggcgtcatgacgtgcgtgaccggcgtgtccggcagcggcaagtcctcgctcgtcaacgaggtgctgtataaaacgcttgcgggcaagcttaaccatgcgaagttccgtcccgggaaatgcgacggcattgacggtgtggagtatctggacaagatcatcaatatcgaccagagtcccatcggccgcacgccgcgctccaatccggcgacgtataccggcctgtttgacgatatccgcagccttttcgcctccacgcaggacgcgaagctgcgcggctacagcgccgggcgcttctcgttcaacattcgcggcggccgctgcgaggcctgctccggcgacggcctgctgaagatcgagatgaacttcctgccggatgtttacgtcccgtgcgaggtctgcaagggcaagcgctacaaccgcgagacgctcgaggtgcactataagggcaagaatattgccgaggtgctggacatgaccgtcgaagaggcgctcgcattttttcagaaccagccgaagatccgcgaccggctgcaaacgctcatggatgtcggcctcggctatgtcaggctcggtcagccgtccacaacgctctccggcggcgaggcgcagcgcatcaagctcgcgacggagctctccaagcgcagtaccggccggacgatctacgtgctcgatgagccgacgaccggtctgcacgtggcggacgtcgcgcgcctgatcgatattctcaatcgtctgaccgacgcgggcaacacggtgctcgtcattgagcacaacctgcacgtcatcaaggtggccgatcatatcatcgatctcggtccggagggcggcgacgcgggcggcagcatcgtctttaccggcacaccggaagattgcgcgcgctgcgccgagagctacaccggccagtttttgaaaaaagaactcgaaagttaacggccaagccccttttctcatacgctgaaaggagagggggcggtgaacatggtcattcagatcaccttatgcgttctgctgatcttgggctttgcctggctgctgtggatgctgggctgcgcgctgctcacgccggtgcgctccggcagggacacgcgcattacgctcgtcgtgcaggcgcgcggggacgcgccggagctggaaaatcttctgcgcggcgcgttgtggctgcgcgagagcggcacggccgcggcggacattctgctcgtggactgcggcctgacggaggaggcggccgcgctggccgagcggctggcgcggcagtgcgaagatctgaaactgtgcaatacagaggaaatttgccaatggatgcaaacaccaatccaatagaattatgcggcaccgtcgcggcggtcatctatcagaacgaggaaaacggctacaccgtgctcaagcttgacgtggatgacggcagccagacgatggttgtcggctgcattccgtacgccgtgccgggcgagtccatgatcgttaccggcagctggatgacgcacccggcacacggccaacagttcaaggccgagtttgccgagcgcaccatgccggagacggcggacgcgatctatgcctaccttgccggacgcgccgtgcgcggcatcggcccggcgacggcgtcactgatggtgtcgcgcttcggtgccgacacgctcaacgtgctcgaatacgaaccggaaaagctctgcacgatcaaaggcatcagtctctccaaggccaaggccatgtcggcaaatttccgccgtcaggccggtatgcgccgcctgatcgagtttctggcctcggcgaacatccgcccggtcattgccctgcggatgtaccagtattacggggatgatgcgctccagctcgtgcaggacaacccttacatactcgtttcggacgccatcggcgcaacatttcaggaggcggacgcgctggcgctcggccacgggtttgacgatcagagcgcagagcgtgtcgccgcggcgacgctgtatgagctcgcctataacgccgtgcgcggccattgcttcatctcgtaccgcaacctgctggcggcgacgtcgcagctcagcggcgtgccggacgagctggtcgccgagagcgtggacacgctcgtgcagagcggcgaattggtgcgcgagcgcgtcgccgggtgcgacggatgctatctcgcgcgtctgcacgaggcggaggcctacacggccgagcgcctgcttgccatgacgcagacggagtaccgccgcatgccggacacggagcagatcgccgcgcgcattgaagcgcagctcggtctgacctttgccgaccagcaaaaggagacgctgcgcctcgcctgccagcatcaggtcatcgccatcaccggcggccccggcacaggcaagacgacctccatccgcgcgattctcgcgctgtttgatgtgctcaagctcgacacgcagctcgccgccccgacgggccgcgccgccaagcgcatgagcgagctgaccggccggagcgcgcagacgatccaccgcctgctcgaggccggcatgagcgacgaccatcaggacatcacttttcggcgcgacgaggacgacccgctcgagtgcgacgccgtcatcctcgacgagtgctccatggtggacatttcgctcatgtgcgcgctgctgcgcgccatgcgcccggagtgccggctcatcctcgtgggcgacgctgaccagcttccgtccgttggaccgggcaacgtcttttcggacatcatccgcagtggcgtcgtgccgaccgtgcgcctgacggagatcttccgtcaagccgccggcagcagcatcgtctcctacgcgcacgcgatcaaccgcggcgaacacccgaagctttcgcaaaacagtggggacttcttcttcctccggcgtgcggatgcgcagaaggccgccgacacggtcgtcgagctgtgccggacgcggctgccgaacaacatgaagatcccgccgtccgacattcaggtgctcacaccgacgcgcaagtatgacaccggcatggaggcactgaatgtgcgcctgcaggcggcgctcaacccgccgtcgcccgagaagaaggagcggcgcttcggcgagaccgtctttcgcgagggcgaccgcgtcatgcagatccgcaatgactatgacatcgtgctcaaaaacccggacggtacgaccgccggaacgggcgtctataacggcgacgtcggtcagatcacggccatcgacccgcagacggagacgctcgccgtgtgctacgacggaaagaccgcgacctacggctttgagatgctcaacgagctcgagcacgcctgggtcatgacggtgcacaaatcgcagggcagcgagtaccgcgccgttgtgctctgtatcggcagggccggacccatgttactcacgcgcagcgtactctacacggccatcacgcgcgccaagtccctgctcatcatcgtcggcgacgagggcgcggcctatcacatgatcgacaaccagacgcagactcgccgctacagcggcctgcgcgcccggctctgcggggagtgcggtgcgatatgaaggtggtcacattcctgctcgacctgctctatccgccgcggtgcgcattctgccatgattttcttgagaccagccgcgagggcctctgcgcgcactgcaagacaggtctgccctttgcacaaaacggcgggcggcagcactttccatttatccctgcgtgtgtttcgccgctcaattacgagggcaatgtgcgtgaatcgctgctgcgctataaattcggcggcgcgacggggtacgccaaggtctatggccgcctcgttgccggcacggtgcgcgcggagctggcgggggagtatgacctcgtcacgtgggtgccgctgagccgcaggagactgcgcgagcgcgggtacgatcaggcgcgtctgctggcgaaagcgacggcgaaggagctcggccttccgctcacgcagacgctgcataagcagcgcaacacgcagccgcagtccggaacgggcgacgctgccaaacgccgcgcgaacatcaccggcgcctaccgcatgaagcggagcgcggacgtgacgggaaagcgcgtcctgctcatcgacgatgtcgtcacgaccggcgccacgctctccgagtgcgcgcgggtgctcggcaaggcgggcgcggagcaggtggtgtgcgccacggtcgcgcgctccgctgactaaaacagccgccggacggctacgattgactataacatccgctgtgcggatgatacaggagttttgctttatgatgatttttgaacgtgacattgccatcgacctcggcacgaccaacatccgcgtgttcgtgcgcggcaagggcatcatgctgcgcgagccgtccatcgtggcggtcgacaagtacaccggccgcatgctcaaggtcggtcaggacgcgcagaagatgctcggccgcacaccggcgaacatcgtggccatccatccgatcagcgcgggcgtcatctcggactatgacatgacggcgctcatgctcaaggagctgctctcgcgcgtgacgtcgttcagtctcttcaagccgcgcgtgctcgtcaccgtgccgagcagcgtgaccggtgtggaggagcgcaacgtcatcgacgccgtcatcgaggccggcgcgcgcaaggtttaccttgtcgagtcggccgtggccacggcggccggtgcgggcgcggatatctccaagccggacggccatctggtcatcgacatcggcggcggtacgacggaggttgcggtcgtctcgctcggcggcgtggtcgagagcgagtccatcaagaccgccggcgacgcctttgacgaggcgatcgtgcgctatgtgcgccgcaagcacaacattctcatcggcaagcgcacggccgaggagctcaagatcggcatcgcgtgcctcgtcccgcgcgccgaggtcggcattcaggaggtcaagggccgctgcctgacgactggcctgccgaaatccgtgaagatcagctccgtcgagctcgtggaggccatcgccgagcccgcgcgcgacatactcgagaccatccacatggtgcttgagcgtacgccgccggagctcgtggccgatgtggcgcaaaacggcatcatcatggccggcggcggcagcctgatctacggtttcgaccagctcgtggaaaaggacaccggcatccgcacgaccgtcgtggacgacgcgctctcgtgcgcggcgttcggcagcggcaagatgctcatgaatctcaacgacatgcaagacggtatggtcaatctcgcgcgcaagcgccagatgaaggcataaacacaaaggccggacatccccggcctttttcttccatgtattatcacactttgaacgaggagctgcgccgccgcttcggctgcaaggtctataagctcgcgctcgacggcggctttacctgtccgaaccgggacgggactatcggtgcgcgcggctgtattttctgcgccggggacggttccggtgccttcgccgctgaccgcgcactggacatcccgcagcagatcgaggcggccaaggtgcgcgtggccggtaaaaacggcggcggtaaatacattgcctattttcagaacttcacgaacacttatggcagtctcgcgcgcatggagcaactgttcacgcaggcgcttgcgccggaggacgttgtggcgctgtcggtcgccacgcggccggactgcctgccggatactgtgatcgcgctgctgcagcggctgaacacggaaaagcccgtctgggtcgagctcggcctgcagaccatccatccgcagagcgcggcctatatccgccgcggctacgatctgccggtgtttgacggtgcggtccgccgtctccgcgcggccggtctggaggtcattgtgcaccagattctcggcctgccgggggagacggatgcgcagatggtgcagaccgcgcgctatatcggtcagagcggggcgcagggcatcaagctgcacctgctgcatgtgctgcgcggcacggatctggcggcggattatgctgccggaaagttcgaggtgctcacgccggagcactatatcgacctgctcgagcagtgtctgtgcgtcctcccgccggaggtagttatccaccgcctgaccggcgacggcgccaagcgtgacctcatcgcgccgctctggagcgcggacaaaaagcgcgtgctcaatgcgatccacgcagctttcgcgcgcgacgatctggtgcaggggtcggaactgtaacgttatttcaggtactgactatgagaagagaaacagattttattcatggaatatgcgaattctgcaggcgaatggattcggcatatccaggcactccaaaagatgatattgaagttaaactcgtggagcatatttcgtgccgggagttccttgccttgaggggttttgcgcgagatttgtgtactggcatttcgagatttttggcatattcacgcgaaaacgaaactgtctccatcgccatgcgtatcaaagaccacggactctatttgtgcaattattacgaccggcaaaagtcatacggaaccattgccgcggctgatagagaaaaagctttctcaaacgtgaaatggcttttcagaaggaagctgtgcgcatcacattcgaccggtatcacaggcttgttccggacattctcgcagcttttgcattatcaagtgctgacggatgctgccgggaatgaactgctttgtttatgcgatgaccatagaaagaccattccgctttccgtagaggacaaaacggcatatgaggctggaaacaaccacgagcatttgttggacgatatttcggacgaagcgttttctgaacttgttgcagacgcacctgttctttgcaggctcatctattgcaatatcaagatgcagtatccgcagagaaagcttgcagtttatgttgcagtaagccgccatgattccctcacgattcgtttccatcaggtgtggacgggagaacctccgtactatgatccggaagatttttcatccggggatgaacgcgttttttctgtcatcgactaggcgctttataaaaatactgcgggcggtgcatcagcaccgcccgcagcttatataatttgccgtgatgaactgtggtaatgtatcgaccgaggaaatcaaatcttactgttgagccagtcgaggatatcggcatagacctcgtccttgttgagctcattgagcatctcgtggcggccgtccttatagagcttgagctttacgtccttgcagccgaccttcaggaagcggttatagaccttcttgacgccctcgccgtagttaccgaccgggtcgccgtcgccggccatgaaatagaccggggtggccttgttcatcttgttgaggttttccgtcttccagatatactgcaggccgcccatcatatcatggaacatgccggcggtcgccatcgcgccgcagagcgggtcggcgatgtactgatccacgatcgcttcgtcgcgggtgagccagtcgagctttgtgcgcacgtggtcatatttcttgttatagctgccgaaggcaagcttgtcgagcgtggggctgtgatacatggggccgttgtcgatcatctcgagctttgccatgagcttgccggcggcgacgacggcggccgggttctggccggtgccgctgatgatgacgcccttgagcccctccggatggtcaataatataggtgcgggtcaggaagctgcccatgctgtggccgaacaggaagtaggggacgtcgggatacttggcggcggtcagcttatggagctgatccatgtcgctcacgacatcgttccagccgtccttttccgcgaagaagcacagctcctgctcgttttcggcggtcttgccgtggccgaggtggtcgtttgcgacgacggcaaagccgtgattggccagaaactccatgaatggggcgtaacgatagatatgctcggcgacgccgtgcgcgatctgcaaaacggcgcggacttcgccgtcgggggtgcattctcttgcaaataccttgtgtttcccgtcagtggataaaaacctgaaatcatgaaaagatggcatagcaatactcctccagttgtgatatactaaatgctacctgaattgtattccaattgacggattccgtcaagtctatggaggttaatgttaattatgaacggctacatcattgcacttgaccagggtacaaccagttcccgctccattatcttcgacagtaagggcaacattgtgtctctggcgcagtatccttttacgcagatctacccgaagccgggctgggtagagcatgatccgatggtcatccttgagagccagatgcttgccatgagcgaggcgtttgaaaagagcggcctgtcgccgacggacatcgctggcatcggcatcacgaaccagcgcgagacgacgatcgtctgggacaagaacacgggcaagcccatctataacgcgatcgtctggcagtgccgccgcacggcgcccatctgcgatcagctcacggccgacggtcttggcccgtatgtgaaggagaagaccggcctgctcatcgacgcctatttttccggcacgaagatcaagtggatcctcgataacgttccgggtgcgcgcgagcgcgccgagcgcggcgagctgctgttcggcaatgtggactcgtggctcatctggaatctgaccggcggccgcgcccatgtgtcggactattccaactgctcgcgcacgatgctgtttgacattgataatctctgctgggacgaggagctctgcgcgcgtctcggcgttccgatgagcatgctgccgacgccggtgccgtcgtccatggtgtacggacaggtgacggcaggtctgccgggactggagacgctcgagggcattccggtctgcggcagcgccggtgatcaggcggccgccctgcttgggcaggcgtgcatcgtgccgggccaggcgaaaaatacatacggcaccggctgcttcacgctcatgaacaccggtagcaaatccgtgcgcagcgtcagcggtctggtcacgagcgttgcgtggtcggtcaacggtaagacgacctatgcgctcgagggcagcgtgttcaatgccggcagctccatccagtggctgcgcgacgagctcggcctgatcggcacggcgcatgagtgcgatatcctggccgagagcgtgccggacaacggcggcgtgtatcttgtgtccgcgttcaccggtctcggcgcgccgcgctgggatatgtacgcccgcggcgcgatcgtcggcctcacgcgcggcagcaacaaggcacacatcgcccgcgccacgcttgagggcatcgcatatcaggtcaaggacctgctcgatgccatgcaggtcgatgccgagagcccgatctccgtcctgcgtgtggacggcggcgcgtccgtcagttcgtttttgatgcagtttcaggcggatatgctgcgcgtgccgatcgaccggccgaagctggtcgagacgacggcgttcggcgcggcgttcctcgccggtattgccagcggcgtctgggagagcgtggacgatattgcgctcctgcgccagtctgaccgtattttcaagcccgaaatggatgccgagcaggcaaagcagtatcacgataactggctgcgcgccgtcggcagagcggaaaagtggagccaggaatgaacctgaacctgttttttaccccaacggatattctattgccggcgcatgcggatatgcggcgctggagcgtcattgcctgtgaccagttcacggcggatgccggctattggcaggcagtgcaggacaccgtctgcgacgcgccgtccacgctgcggctgatgctgccggagttttacctcggcaagtgcgatgaggctgcggcgacgcgcgagatccagcagaccatgcgccgttacctcgatgacggcgtgttccgcaccgtgccgcacagccttgtgctcgtgcagcgcacgctgccgggcggcgccgtgcgctgcggcgttgtcggcgcgctcgatctggaggcgtatgattacgcgccggactccgtcacgccgatccgcgcgacggagggcacggtcgcctcgcgccttccggcgcgtgtgcgcatccgtgcggcggcggcgctggagatgccgcacatcatggtgttttacagcgatccggaggatacgatccgccgggaagcgcaggcggcggccggcgaaacgctgtatgattttgacctcatgtccggcggcggtcacgttcgtggtctgcgcattgcgggcgcgaaggcggatgtgcttgccgcgcgcctgtgcgcgaccggcgtcggcacggacggcgcgcaccccatgcgctttgccatcgcggacggcaaccacagtctggcggcagcccgtctgtgctggctggagaagaaacaaacgctcacgcccgagcaggcggcggccgatcccgcgcgctacgcactcgttgagcttgtgaacctgcacagcccggccgtgacgtttgaacccatccaccgcgtgctcttcggtaccgatgcgtccaaatggatgcaggcggcggagacggcgctggcatccactgacggcagcggctatgcgatctccctgatcgccgggcgtgcgcgccgcgacattctcgccaagggcgcgtcgctcggtgaagcgatcgccgcgatggatgtgttctgcacggcctatctcgcggaaaacggcggctcggtcgattatatccacggcgacgatgaggcgatcgcccttgcggccggtgatggctgctgcggaatcctcatgccgcgcatggataaggcggagctctttacgtcggtgctgcgctccggcccgttcccgaaaaagagcttttccatcggcctcggcgcggacaagcgctattacctcgagtgccgcaaactgtaattcgtaactatcttacctgagaggcagccaatcggctgtctctttttttgttctgccgcgcgcggcgcgtgcataggatgtggcagaacaaaagaggagggaccaccatgatcttcacaaatcaggcgctggcgctgttcccgccggcgctgggacaggccattgcgaacacgcagcgcgaccggcaggaactcgtggaagagatctgctgccgcatcggccaggtgcccgtgctgctgacgcaggcgcatgtatatccggcggaatgccgcgccattctggcgggtgatctggactatctgctcgagcgcgcgacgggagcgtccgtttacgcggctggagaacagatccggcaggggtacttacagacggccggcggctgccgcgtcgggctttgcggctgcgcttacggacaggctgccgggcagatcgacggcatccggcagctgagctccgtgtctgtgcgcatcccgcacgcggtgcccggctgtgccgatgcgcttttgccgcagctgctccgcgatgggttttgcagtacgctcatcctctcgccgcccggcagcgggaaaacgacgctgctgcgcgagtgtgtgcgccgcctgtccgatatgggcacgcgcatctcgctcatggacgagcgcggcgagatcgcggccgtgcagaaccgcgcgccgcagtttgacgtcggggcaaatacggacgtgatgaccggcgggcagaaggcagcctgctgcatgatgctcctgcgcgccatgcggccggatgtgctggcgtttgacgagatcagcgcgccggaggacatcgaggccatccgcatcgccgccggctgcggcgtcgcactgctggcgacggcgcacgcgcagagcgttgcggcgctgcggcacagggcgctgtaccgcgcactgctggacgagcatattttccgccgcgccgtgtgcatcacgcgcagcgacggcgagcgcgtctataccgttgaggatctgacatgacgcgcctgcactgggtgggagcggcgctggtgtttctgggcagtacggccgccggattcgcgctgcggcaggagctgcggctgcggctgcgcctgctcacggcggtgatcgacagcctgaacctgctgcgcagcgatatcgtcggccgtctgctgccgctgccggaggcgctgcgccatctggcggcgggcgcgcccgagccgctgagcacgcaatatgccgcgctcgcagatggtatcacggacggcggccggccgttttccgagagctgggcggccgcgtttcaggcgctggacatgctgacgcccgatgtgcgcgcagcgctgctgacgctgggcgaacagcttggcaagtatgacgcgcagattcagcgccgcgcgctggacacctgcatcgagacgctgcaggctgctgcggcgcagatgcaggcggacacgacacagcgcggaaaactcttttgcggcctcggcgcgacgcttggtctgctcgccgccgtggctctgttttgattacacaggaggcgcttatggacgttgaccttgtctttaagattgcggcgatcggtattctggtcgccgtgctcaatatcctgctctcgcgcgccgggcgcgacgagcaggcgctcatgacgaccattgccggtctggtcgtggtgctggtgctggtgatccagaagatcagcgagctgttcgatttaatcaagagcctgttttccctgtgatggagccggtctttcaggcgattatcatcgtggtcattgccgccgctgccgccgccacggtctacaagaccgtgccgggcatgtcgcttctgctgagcatggcggcagcactgctggcgctgtttttgtgcatcggtctgctggagccgctggcggcgtttttccgcgatgcgatcgcggtcagcaagctctccggcgtctacaccgggccgctgctcaagtgcatgaccatcagcatcctgacgatgatcggggagagcctctgcaaagacgccggacaggctgccggcgcctgcgcggtgcagctcgttggcgtggcggcagcgctctatgccgcgctgccgctgatgcgcacgtttttgaccatgatcggagaatgcttatgaaaaagcggctgcttgtgcttttgactgtgctgctggtgctggcggcgtgtacgccgggggcgtttgcctacgatgttgcggctgagcaggcagcggatttcggcacggcgtcgctggaatccgcgcttccggagcaggcatatgacgccttcggtgaactgtccgttgcggatgccgcgcagccgcagtccctgctcgcaaagctctgggcctatgtgctgcacgagggcggcggggccgtcgcgtcggcggcgcgcaatgcggcgctgctgctggcgatcgtgtttctgtcggcgctgtgcgcgtccctttccgtgagcggcgcctgcggaaaggtcacgcagatggccggcacggtggcggtcgccgcgctgagcgttacgcacgtgacctcatgcatcaccgcgggcagcgaggcacttgcaacgctgcgggatttttccaagatcctgctgccgagcatgtgtgccgccgcggcggcgagtggcgcggcgacgtcggcggccgcaaaatacgcggcgacttcactgtttctggatgtgcttctgtccgcggagacggcggtgctcctgccgctgctgtatctgtacgcaggtacggtcatctgcggcacaacgctcgaaaacgacgtgctcgcgtccctcagcggtctgctgcgcaaggcgttccggctgctgctcatcggctttgcgagcgtgttcacgctctacctgtcgctgacgggcatcctcaccggctcggcggacgcagccgcagccaaggcagtcaagacggccgtctccgccgcgcttccggtcgtcggcagcatcgtggccgatgcggcgtccacggtcacttccagcgccgcgatcctgcgcagcggcattggcgtcgtcggcgtcgtcagcgtcgccgccatgtgcgtcacgccgtatttgcagttcgtcatgcactatgtcctgtacaagcttgccgccggaatcgccgagtcgttcgcggacaagcgtgtcgggcggctgatcgacggctttgcggacgtgtacggtttcctgctggggatggtcggcgtggcgtcgctcattttgttcctctcgatcgtgtcgagtatgaaggcggtgacgggatgatggagtctgtgcgtacctggctgctcagtctggcgggcgtggcgctgctgacggcgctggcgtcgctgtttccgacgtcggagagcctgcggcgcgtcacgaagctggccggcggcgttgccctgacgtgtctgctgttctcgccgctggtgacgttcgattatgacgcttatgccgccgcgctgcaggactatcacgtctcggtgtcgacggacggcgcggtgtccgacagcagcgagcgattgcagcgcacggtcatagaatcggaaatgcgcacatatatattggacaaagccgcgcagtgcggcgctgcgctcgacgatgcgcaggtcacgctgcagtggagcaccgacggctactggtatccgcagtccgtccgcctggtcacatccgggccggcagcagaaaacagccgcctggcgcagatcatcgaggccgacctcggggtcccgcgcacgcggcaggaatggagcagtacatcatgaacacacgaaaactcagcgctttcgcagccaagtataaatacgttctcattatcctgctcgcggggctgatcctgctcctgctgccgaccggcagcaggacaaaggccaagacggcgcaggcggcagccgtttccgagcagacacagccgcagacgatccaggccgaggagcagcgcctgacaacgctactgcagcagatcaacggcgcgggacaagtgcaggtgctgctgtcctatcgctgctcggccgagcgggagctggcgacggacgatagcggtgagccgaccatcatctccgccggcggcggggcacaggaggcggtggagctcaagacggtcagcccgcagtatctcggcgcagtcgtcgtctgtgacggggcggattcgccgcaggtgcagctcgccgtcacgcaggcagtggcacagtttaccggcctgagcacggatcacatctccgtgctcagaaagcagccggatccgcaatctaaataacgggagggcgactatgaaaaaaaccaaacgaaacattgcgatcattgtggtgctgctgtttgtctgcgccgcgatctactttaactggtcgtacaacacccagtggggaaaggcggacgccgaaatggccgccgccgaggacgccgccacggcggcggtcaaggcggaggaggaagcggccgcagcgtcggcgtcggcatccgatgattactttgccaaagcgcgcctgacgcgccagcagtcgcgcgacgaggcgctgtcgctgctcaaatcagcctcgacggccgagggcgcttcgcaggcgacgatcgacagcgccatgagtgccatctctgccatggcgagcgactccatgaccgagacgcagatcgaaaatctcctgctggccaaggatttttccgagtgtgtggtctatatcacggatgagggcatcacggtcgccgtgcccgcgccggccgatgggctgagcacggcacaggtcgcaaccatcacggacaccatcgtcaaagaaacggactataccgcgccgcagatcaaggtcattgaggtcaaggccgacgcgcaggacacgcagtgaaccatcctgtaaaacacatccccgctccgaccggagcggggatgctgccatgttcaagaagaaactgcccatttcatgatcggaaacgggcagttacggttcttcggtttcgtccggaatatagaccagcacatcctccacgcggcaggagagaatgcggcaaaggtcattgagcgtcgcggtggtaatattgcggttgtgcttgagagagtccaatgtgccgcggctgaacgaatcgtttttgatcagggcgtagatcgtgatgcgccgctgcttcatcgtctcccatagtggggtgtaggtgatcatgcccatgcctcctcactgtccgatatttcgtacttttccttcttgttacattgtccaaatgttaacttgaccattcccaaagtatggggtacagcgcattcgggcctcataaaaagcgtaaataccggacgactctgccggtgacctgcgagcagatcactgcgactttgagggcgttttgcaagcgcgtaaagaagcaatgaaaatacgatctcctctgattctgacggaatcagaggggatcgtttatctcaaatgtggatcaattcatgtaaaaaccgctgtttggcctcctgaagataagtgcggctgatcggaatgccagatccgctgtccatggtgaaatggttgctgccgatcgcctgcacatgtttgagatttacccagtagctctggtggcagcggacgaaatggccggacccgctgatcagcgtttcgggtgattcctgcgtcaggaaaacgccctgctgcgtaatcacttttgtcttgcgcagattacgctccagatacagtacatcctgcagcgcgatcacgtgcgtgctgccatctttctgcgccgtgatctgcgcagaacgatcgcccagcgcggtcagggcttgatgcagcgcagggtcgatccgctggtggagctgcgactttaggataaagtagatgtgctcggtttcgtatacctctgttgcatagctgaggtagctgctgaggaaaatgatctggcagaagggcgcgtactgcttcatgctttgcgccaaacggatgccatcctgttccggcatgcagatatccagcagggcaatgtgcggctgacagtcggttttgcgcaggtgttccagcaacagtgtgggatcgcggaaatcggagatgtctgcaggtgtagatccgagtgtgtcccgaatatctataacgatttctttacagcaaagcgcatcatcgtcacacacaactattttcagcataaattgcattaccttcttttgcctggcccagcttcagaaatacgggcacggaataattaccatttcctgtttcgctcatacagctgccctggtacttttctgcgactgacttcgagatcagcattcccacgccgcgctccagctctggaatgcggcgctgtttgcgtccctccggttcaggtacagcgggattggattccgtgatgaccagataccccttttcaatgtgcgcattcagctcgattttgggattttcgagctttgcgcacgcctcgacggcgttatccatgagattgccgaacacgatgacaaggtccgagttcgagaccggcagctcgaccggcagaataatgtgcgtctcaacagtgatcccctgtgcctttgcctcctgaacgcggccatagaggaaggcgtcaatgaccgggttgtcgcactgcccgagttgtgaactgcgctgattctcatccagaaattgcctggcgtactccgccgcctcctgctgctgaccgttttcaagcagataccggatcgtattgacgtggtgcagaatgtcgtgccggatgcggcggttagcctcatactgcgaagtcagggctatatagtggctcagctgcatggtcgatcggacctggaagccggatgatctgagccgctttgtggatgccggcagcgtcggctcctgggcgctggacgcgatgaaggacgccgttgcgatcaacgcgatctccggcgtcccggtcgacggccgcctgtacatccagccggccagaaacgcgacacgcgcggaggctgcaaagatcctgatggtgttccataagacgatgaccaagtaattccaagtgtgcggatgcaccctgtgaatctcacggggtgcatctttttgccggacgggaaacatttttctttctttttgccgctgtgcgtggtacactatactgtacaattttatcaggaggtatttttctatgccggaaaattatattacttgccaggatgaaaagggcagcatcaatatctctgaggacgtcgttgccgccatggtgcgcgcagcgatcacggaagtggacggtgtcgccggtgttgcgacctctaccggtacggagctggccgagctgctcggcatcaagtctgccgccaaaggcatcaaggtgcagatcgtcgacggcacgatgacggtcgatacgatcattacggtgcgctacggttgcagcgtcgtggcggtcgcaaaggccgtgcaggaatcggtcacgagcgcggtcgagtcgatgaccggcatgggcaagcccattgtgaacgtgcacgtgtccggtgtggccttcgacaaataaagaaaagcaggagttatcactatgacaagaacggttgcgcgtgagatcgcgatccagctcagctttgccgcgcagctcgccggggacgatgcccgcgagacggcggatactttcttcagccgcgagtattttgcgacgctggcggaggaagacccgctgtttctggaatatccggacgagaagcagctcgattatatccgccggctgaccggtttggtctatgaccatatgtacgagctcaaccacatgatcgaaaaatatgcccgcggctggcggctggagcgcatttcccgcgttgccgcggcgatcatgcgctgcgccatgtgcgagatcctctatatggacgacgtaccgaatgccgccgcgatcaatgaggcggtggaactggccaagggctatgaagagccggagacggtggcgtttatcaacggcgtgctcggcagctttgtgcgcggcgaggtcgagccggagtccgaagcggaagaagcatccgctgaagcgccggccaatgaaccggagcagacgcccgagaacggcgccgaagcctgacatggcgcgtacatcctttaccgtaacggagctcaacgcccacatcaagcaactgctggatgcggatgtgctgctcggtaatgtctgtgtaacgggggaactgtccaactacaaggtctacccgtccgggcaccattatttcacgctcaaggatgccgagagcagcctgcggtgcgtgatgtttcgcagcagcgcgcagtcgctgcgctttcgcccggcgagcggaatgagcgttgcggccatcggccgcatcgcggtctatccgcgcgacggggcatatcagctctactgtacgcggctcattccgggcggtgtgggcgacttgtatgccgcctacgagcagctcaaggagcagctgcagaaggagggcctgtttgaccgcgcgcacaaaaagccactgccgctgtttccgcagcggatcgctgtcatcacgtcggcggcgggtgcggccgtgcgcgatatcatccgcgtgctcggtaagcgctggccggccagcgaggtcgtgctgctgcccgtgcgcgtgcaggggacggaggcaccggcggagatcgccggagcgatccggtatgccaaccgctatcgggtcggcgacctcatcatcaccggccgcggcggcggttcgatcgaggatctgtgggcgttcaatgacgagcgtgtcgcgcgggcgatctacgattcggatatcccggtcatttccgccgtcgggcacgagccggatgtgacgatctcggactttgtggccgatttgcgcgccgcgacaccgtcgaatgcggcggagctggccgtgccgaacgcggaggacatccgcgagacgctgcgcgggtatgatatccgcatggtgcaggcgatgcgcaagcagatggcacagcgccggtccgcactggacaatctggccggccgccgtgtgctgcagtctccggcggcttatttcgatctccggcgcgtggagctggactatacccgcagccgcctgacggcggcgggggagcgctggctcgccgcgcgcagacatggttttgcgcagtatgcggcggcgctggacgcgatgagcccgttgaaggtgcttgcccgcggctacgctgtggcgacggatgccgacggcacggtgctccgctcggcggcaaaggtgcagccgggcgatccggttcgtgtacagcttcaggacggtgcattgcactgcaccgtaaacaacagggaggatgcccatggcaaaacagaaactgacctttgaagcgtccatgcagcggctggatgagatcgtcaagcagctggaaaagggcgatgtgccgctcgatgcgtcgctggcgctgtttgaggaaggatcgcgcctgcttgcggcctgcaatgaaatgctggacacggcggaacagaaggtcgtgcagctcaaaaaagggagcgacggcgcgcctgtcgagctcccgtttgaaactgaggaataacgtatggattatcagacacagtatcaggaatacaaagcgctcgccgatgcggcgctcaatacctattttgcggacacgaccgtgtcctatcatcgtctgctggaggcgatgcactatagcctgaccgccggcggcaaacgcctgcgtccggtgctggtgctcgcgttctgcgcagcctgcggtggggatgtgcgcgcggcgctgccagttgcgtgtgcggtcgagatggtgcatacttattcgctcatccacgacgatctgccgtgcatggataacgatgatctgcgccgcggcaagccgacgaaccacgtggtctatggcgagtgcacggcgacgctggcgggcgacgccctgcaggcggaggcattccacacgatcctttcgacggagctgccggcggatgtgcgcgccgagtgcgcgcgcctgctcgccgaggctgccggtgaaaacggcatctgcggcggtcagcagctagatatggaaggtgagggcaaggtcctcacaaaagaggaactgatggatatcaacgaccgcaaaacgtcggcgatgatccacgccgcatgcctcatgggcgtgacctgcggcggcggaaacgcgcagcagcgcgcggccgcggcgcagtatgccaaggcgcttggtctggcgtttcagatccgcgatgacatgctcgatgtcatcagtacggaggcggaactcggcaagcccatcggctcggatgcgcgcgaggggaagaacaccttcatggcgctctatggtctggagcgctgcggcgcctatgtgcacgagctgtccgagcaagcggcagcagctgtggacagtgtgtttgcggacagcgcatttttgcagcagctcgcccgctcgctggcagatcggaaaaactgaatccataaaaacaccggacttccggtgaaattgcgaaaagtgtcggcttactcttgtaaagtccggcactttttgttatagtatactttgtattattatacgtgaggtattctgttttgagtatattagagcgaatccattcaccggccgacctgaaggcgctgccggcggaagaaattccggcactgtgtgcggaacttcgttcttttctggtcgagaatcttgcgaaaaccggcgggcatctggcgtcgaatctcggcgcagtggagctcacggttgcgattgaccgggtatatagcaccgaaaaggaccgactcgtgttcgacgtcggtcatcagagctatgtgcacaagatcctgaccggacggcgcgaagcgttttccacgctgcggcagttcggcggcattgccgggtttccgaagccggatgagagcgtgcacgatgcgtttgtggccggccacgcctccacgtcgatctccgtcgcgctgggcatggcccgggcgcgtacactcacgggggcggactatgacgtcatcgccctcatcggtgacggcgcattgaccggcggcctggcatacgagggcctgtcggatgccgggcagagcggcgagccgatggtcatcgtgctcaatgataacggcatgtccatcaacaaaaacgtcggcggcatggcaacgctgctgtccaagcagcgcgtgaagccgagctatctgcacttcaagcagttttaccgcaataccgtcggcaaggcgcgcggactgtataaggtgctgcaccatgtgaaggaacatgtgaaggatcttgtcctgccgaacaacatgttcgacgatatgggcttttactacatcggtccggtggacgggcacgatgagcagcagctggaaaagatgctgcgctgggcgcgtgacctgcgccagccggtgctgctgcatgtggtgacgcaaaagggtaagggcatctcctacacggagcaggcgccggagaaataccacggcgtcagctcgttcgatcccgtgaccggggcgctgcctgcgccgaagccggacttttcgcacgtgttcggcgagacgctctcgcagctggcggatgaagatccgacggtcgtcgccatcacggcggccatgcagaccggcacgggcctgacgacctttgccgagcggcatccggatcgcctctacgatgtcggcatcgcggaagggcacgcgatcacgatggccagcggcatggccaagcaggggctcaagcccgtcgcggcgatctactcgagttttttgcagcgcgcgtatgatatgctcatccacgacacatccctgcagcggctgcatctggtgctcggcgtcgaccgtgccggcatcgtcggcaatgacggcgatacgcacaacggctgctttgacatcagttatctgagctccgtgccgtatatgcgcatcctctgcccggcaagcttcgccgagctgcgcgcgatgctgcgcaaagcggtgctggagctgagcggcccagtcgccttgcgctatccgcgcggcggcgagggcgcatatcaggactgccatccggaaccggtcacggttttgcgtgagggcaatgatctgacgatcctgacctacggcatagtcatcaacgatgtgctgcaggcggcggatctgcttgcgcagcagggcatttcggcagaagtcgtcaagctggcgcaggtcgcgccgctggagttggcgccggtgcttgcgtccctgcacaagacggggcgtctgctggcggtcgaggatgtgtgcgctgccaactgtatcggcgagcaggtgctctctgctgccgggcaggccggtatggcgctgaaggccgcgcggctgctcaatcttggcaatggcatcatcccgcacggagcgccgaatgtgctcaaatcggcatacggtctggatgcccgggcgatcgctgccgctgcgcaggcgatgcgctccggcgagaaagaggggaacggcgtatgaagaaggtacgactcgaccagctcgtctttgatcagggcctgagcgagagccgcgagcgcgcgaaggcgatcattatgagcggcgttgtctatgtcaacggccagcgcgcggacaagcccggcgcgcaggtcgcgcccgatgcgaagatcgaggtgcgcggcaacacgctgccctatgtcagccgcggcggttttaaattggaaaaagcgctcaaagtgtttccgatcgatcccaccggcctgacgtgtatcgactgcggtgcctcgaccggcggatttacggatgtgctgctgcaaaacggtgcggcaaaggtctacgccgtcgatgtcggctacggccagctggcgtggagcctgcgcaacgatccgcgcgtgatctccatggagcgcacgaacgtgcgctatatcacagccgagcagatcccggaaccgctggatctcgcggtcatggatctgtcattcatctccgtgaagctcattctgccggcggtctgtccactgctgaaggacgatgctgcggtcgtctgtctcatcaagccgcagtttgaagccgggcgtgaagaggtcggcaaaaaaggcgttgtccgtgacccgaaggtgcatctggaggtgctcgagagctttctggactttgtgcccggcacgggctttaccgtcatggggctggactattcgcccatcaaagggccggagggcaacattgagtaccttggctacctgcgcaagggaacacatcccgcgccggagctcgatccggcggccattgtggagcagtcgcacagtgcgctggcccacggaaaagagagcggcatatgaaacacatcgtcattgcggccaatccataccgggacagcggcctgcaaaaagcgctgacggtttaccgtatgctcacggagcacggccatcgggtggtcatgtcaccggtatttgcgccgaaggcctacctgccgggagatgtcctggtgcggccgctggaggccgccgcgcacgatgctgcgctcatcatcgtcatgggcggcgatgggacgatcctgcatgttgcagtcacactgcgtgaccatccgatcccaatcatcggtgtgaatttcggcggcaagggatttctggccggcctagaggacgacgagctggatatgctgctcgagatcgcggatgggcagtatacggtcagccgacgcatgatgctcgatgtggagctcgtgcgcaatgagcggatcatctgcacgcagtcggtgctcaacgacgtggtcatccacggcggtcatgtggactgcatcggcgtgaccgcttatggcgacggcgtgcccatcacgcgcttcaacggcgacggcatcattgtcgccacgccgactggttccacggcctattccatgtcggccggcggcccgctcgtcgagccggaaaacgagaatatcatcatgacgcccatctgcgcgcacagtctggccggaaagtcctttgtgcttgcgcccgggcggcagatcacgatcgtgccggagcgcattcatgaccggccggccatcctcgtggcggacggcggcgacagcatcgcgctcatccgcggcgatcagatccgcatccgcagatcggacaattacacgctgctggccgataccggcatccgcagcttttatgagacggcttttggcaagctgacagacagactgtgaggagggacgacgtgaaatccacccgacaaaacatcattttgcagatcattgcagagcaggagatcgagacgcaaaaccagctcatggatgtgctggcgcagcgcggcgttccgagcacgcaggcgacgctgtcgcgcgacattaaggagctgcacctgacgaagacgctcgcgccgagcgggaaataccgttacgccgcaccggcggcggacgaatttcccggctacgatgagcgcctgaagaaaattttccgggaatgtgtgacgtcgtatgccgaggcgcagaacatcatcgtcatcaagacgctgccgggcctcgcctcggctgcatgctccgcgctcgacagtatgcgcatcgacacgctcgtcggcacgcttgcgggcgacgacacggcatttctgctcatgaaggacaatacgtccgccgatgagtttttccacgagatcgaaaagctgctttgaggacaccgcaggaggtgaagcgctttgctgcgagaactgcatattgaaaacgtcgcggtcatcgagcgggcggatctggagctcggccccggcctgaacatcctgaccggcgagacgggcgcgggcaaatccatccttgtggacgccatgcacgcgatcctcggcgcgcgcgcctcgcgcgagctcgtgcgcaccggcgccgaaaaggcggtcgtctgcgcgacgttcgatcctgactcgtgccgggactggtgcgaggaaaacgagatcgagtgcgacgatgagctcatcatccgccgccagatcacggccgagggcaagacgtcctgccgcgtctgcggcgtcccggtcacaacggcgcagctgcgcacactgggcgcgctgctgctcgatatccacggccagaacgacgggcagcacctgctcgatgagcgggagcacctgcgcaatctggaccgatttggccagttagacccggagctcgcgcgctatcgcgagcagtaccaggcctatcaggcgctgtgcaaggagcgtgacacgctctcgacttatgaaaatgaaaaagaactgctgaccgaaagcctccgccgccagatcgaagagctggagcgcgcggagctcaaggccggggaagaggcggagctcacggagcgcagcgacctgctgcgcaactttgaaaagctctcggaagcggtcgatcaggcgtatgacctgctggccggccgcgacgattccgccgctgcgctggccggagaagccctgtcggagatcgagcgggccgccaactacgcgggcgagctcgcgcctttgccggaggccgtcaagggcgcggtcttcacgctgcaggacgcggcggagacgctgcgcgacttccgcgacgggctggatttttccgacgaggaatttgaccgcatcgaaacgcgcctgtcgctgctccggcgtctggagcggaaatacaatacggatgaggcggggctgatcgacacgcttgaagcggcccggacccggctcgaccagatcgaatacgcaggcgaccggctgcagaagctcgaatcgatgatccaaaagcaggcggagcagacgcgcgcagcggcggcggaactgacgcaggcgcgccggactgccgccgccgcgctcgagcggcaggtcgagcgtgaactgcgcgagctgtccatgccgtccgtgcgctttcacgtggagatcacaccgctcggcggtacgcccggatttcagagtacaggcgcggacaatgtgcgttttttgatctcggcaaatgccggagaggcgcttgggcgcatcagtaagatcgcttccggcggtgagctctcgcgcatcatgctggcgctcaaaaacgtgttcgctgaacgcgatgacgtgccctccatggtctttgacgaggtggatgccggtgtttccggcgtggccgctcagcgtgtcggtgaaaagctcggtaagctctctatggtcaagcaggtcatctgcatcacgcatctgccgcagatcgcggctatggccgatcagcattacctgatcgaaaaacgcgagcaggacggacgtacccgcacgacggtgcagctgctcgacagtgacggccgccagcgcgagatcgcgcggctctacggaggcgatcacatcacaccgctgacactggccagcgcggcagagcagctcgcttccgccgatgcctataaacaatcgcttaagaaaggtgagagagaaccatgagtattcaggaatccgccattgcttatcacgacaacggctttaactgcgcgcagagcgtgctcgcagcgctgcaggaagagaccggcctggacgaaagcacggcaaagcgtgtcgcggccggcttcggcggcggtgtgcgctgcggtgagatctgcggcagtatcaccggcgccgtgatggcgttcggccttgcggccgatcaggcgactgccacggccatgaccaagcagatgacgcagagcttccgcgccgagtttggctgcctgcgctgccaggagctcgtggcgaaaaacggtggcaagggccactgcgcccatatgattgcttggggcgcacagcgcgccgaggagatcctcgcagagaacaaagtgaaagaataacgcgcaaggagagaaaacgatgacactgtatgatgaactgatcgcccgcggcctgatcgcgcaggtgaccaacgaggaagagattaaaaacatgatcaacaacggcaaagccacgttctacattggctttgactgcacggcggactcgctgcatgtcggtcacttcatggcgctgtgcctgatgaagcgtctgcagatggccgggaataagcccatcgccctcatcggcgacggtacgacgctcatcggcgacccctccggccgcaccgatatgcgccagatgcttactgaggagaccatcaaacacaatgccgagtgcttcaagcgtcagatggagcgcttcatcgacttctcggacggcaaggcgctcatgctctacaattccgagtggctcaagccgctcaactacattgagctcctgcgcgaggtcggagcatgcttctctgtgaacaacatgctgcgtgctgagtgctacaagcagcgcatggaaaagggcctgagcttcctggagttcaactacatgatcatgcagagctacgacttctactatatgttccagcactacggctgcaacatgcagttcggcggcaacgaccagtggtcgaacatgctcggcggcacggagctcatccgtcgtaagctcggcaaagatgcacacgctatgacgattacgctcctgctcaattccgagggcaaaaagatgggcaagaccgccaagggcgccgtctggctcgacccgaataagaccacgccctttgagttctaccagtactggcgcaacgttgacgatgccgatgtgctcaagtgcatccgtatgctgacattcctgccgctcgaggagatcgacaagatggacagctggcagggtgagcagctcaacaaagccaaggagatccttgcctacgagctcacgaagatggtacacggcgaggcggaggccgatcaggcgcaggcagctgccaaggcagtgttcggcggctccggcgagggcgtgccgacggtggagatcacgaaagaagacggcaatgacatcctcagcctgctcgtcaagagcggtctgtgtgcatctaagtccgatgcgcgccgcaatgtgcagcagggcggcgtgactgctaacgacagcaaggtcaccgatattgccaagacctttaccgaggcagagctgagggacggcgttgtgctcaaacgcggcaagaagaatttccgtaagatgctgctgaagtaaccaaatatccgacagattgatcgtgccccgccgtttctggcggggcacttttgttaacgttgccgaaatgtgtaaatttttatccgaacacttgaaaaaagcaggttagagtggtataacttgaaattgaaagttagctgcatctaacagaaattcgagcaagctaaccagaccgcaattctgcggatcaaattacatggaggtaaatcgttatgagcatggaaaaattgggagcatttgttggcggcgcgctgtttgcaacagtcggggcaaagattcttgcaagtaaagatgcccagaaggtatacgtttatacgacggcagcggccctgcgcgaaaaggatgatgtcatggcggttgtaacgaacgtcaaggagatcgcgggtgacgttctggccggtgccaaggcgttcaatgaaaagcgcgcggccgaacaggccgaggtcattgaggatacggcggagaaggctgagtaagtatgaaatgcacaatcctgcatgaaacccggggccgtatgcgcgtgcatacaatgcagggtgccatgtcgctgcagcaggcggacattctggaggcatacctgaatcgggtctccggcgtcacaaaagcgacagtctatgaccgcaccggcgacgccgtgatctgctacgacgggccgcgggaaacggttacaaaggcgctctcgtcctttgcctatgccaaggagcaggcgctcgcgccggagcacagcagccgcgccctgaatcgtgattttgaggacaagcttgtcgcatcgctgtgctggcgcggcatcaagcagctgttcgttccgagctcggtgcgcacgctgatcacggtcgcgcgttccgtgccgtatatcaaggccggtatgacgtgcctgatgcacaggaagatccaggtgccggtgctggacgcaacggcgatcaccgtttcgatgctgcgcaaggacttcaagacggcaagctcgatcatgttcctgctgggcattggcgacattctcgacgagtggacgcacaagaagtccgttgccgatctcgcacagaccatgtccctgaatgtggacaaggtctggaaagagacagacgccggctccgtacttgtgccggtggcagacgttcaggtcggcgaccggatcgtgatccataccggcaacgtgatcccgcttgacggcaaggtcgtttccggcgaggcgatggtcaatcaggcttccatcacgggcgagccgctggccgtccgcaaagcggagggcggctatgtctacgccggtaccgtcgtcgaagagggcgactgcaccatctgcgtggaaaagagcgccggcagcggccgctacgaccgtatcatccgcatgatcgaggagtcggaaaagctcaagtccgcaacggaggatcacgcatcgcaccttgccgatcagctcgttccgtacagtctgggtgcaacggcgctggtctggctcctgaccgggaacatgaccaaggcgctggccgtgctgatggtcgatttctcctgcgcgctcaagctctcgatgccgatcgcggtgctctctgccatgaaggaggccagtgactatcacctgtccgtcaagggcgggcggttccttgaggccgtgtccgatgcgagcacgatcgtcttcgataagaccggcacgctcacgcgcgccgagccgaaagttgcacagatcgtgaccttcggcggcaatgatgaggcggacatgctgcgtctggctgcctgcctggaggagcattatccgcactccatggccaaagcggtcgtcgcggaggcggcgcgccgcggtctgcgccacgaggagcgtcattcgtgcgtggagtatctggtcgcgcacggcatttccagcagcgtcgacggacagaaggtcgtcatcggcagccaccactttgtctttgaggatgagcactgcgtcatcccggcaggggagcaggccaaattcgatgctcttccggatacgtattcgcacctgtatcttgctgtttccggtgtgctggcagcggttatctgcatcgaagacccgctgcggccggaagcggccgatgtcatccgtggcctgcgggagctcggcgtgaccaagctggtcatgatgaccggcgacaatgaaaagaccgcccgcgcggtcgcggaagcggtcggtgtggatgcctatttcgccgaagtccttcccgaggacaaggccgcctttattcaggcggagcacgcggccggacgcaaggtcattatgcttggcgacggggtgaacgattccccggcgctctccgaggccgatgccggcgtcgccatcagtgacggcgcggccatcgcacgcgaagtggccgatattacagtcggcgccgatgatctgtacgccctgctgacgctcaaacgcctgagtgacgcactcatggagcgcattcacagcaactaccgcaagatcatcagcttcaacttcctgctgatctgcctgggtgtggccggtgttctgccgcctgcgacctctgcgctgctgcacaacgcctccacgctggtcatcagcctcaagagcatgaccaagctgttggcgtgatcttctgcgaatcgcaaataaaaaagcctggcgaacgatggttcgtcaggcttttttgcgcttggctcacgcctcggccggggccgggagcttgcagacgtcgatccactcaagggcgttggaatatttgtagagctcgtccagattcagctcgatcgcgctcgacgggctgccgacggcggggaacaccgtctcaaaccgctgcagcgacacgtccagatacaccgggatgccttccttgcagccgaacgggcacacgccgccgaccggatggcccaccagctccagcacctcgtcggccgagagcatcttggccttcatgtggaatttttccttgaatttatggttatcaatgcgcgcatcgccggcggcgaggatcaacatgcagccgtccgccgttttgaacgacagcgtttttgcgatccgcgcaccctcaacaccaagagcctttgccgccagatcaacggtcgcactcgagaccgtgaactcctgcacacggtcctccataccaaactgccggaaatacgctcttcctgcttcgatagacatgtgcttcactcctattctttgaagtatctgaagcacatgatagcgcaggcggcggcgttcgtcaagccgcgattttttgccgacggtacttgcaggataaccgtaacaggtgtataataacttagttatagaaatgcggatcgtgtccggcttgccggatatccatagatcggagtggcatccatgacaaaacttgcaccttccattctctcggcggacttctgcacgcttggcgaggacattcgccagattgaggccggcggtgcggactatgtccacattgacgtgatggacggcatttttgtgccgaatatctcgatcggcattccggtcgtgaagtccgtgcgtaggtatacgcagatgtttctggatgtgcatctcatgatcgaccggccgcatcgctatgtcggcgcgttttgcgatgccggtgcggacctggtcgtgttccatgtcgaggcggacgagccgcaggacattttcgccgcgatcgaggatgtgaaggcgcacggcaaaaaggtcggccttgccattaagccgaagacgccggagagcgtgctcattccgtatctgccgctgctggatctggcgctggtcatgacggtggagcccggcttcggcggacagcgcttcatggccgatcagctgccgaagatcgcagcgctgcacgagcgcatcctgcaggtcaatcctgcgtgcgagctggaggtggacggcggcatcgacccggagacatccccgctcgtaaagcaagcaggcgccaacgtgcttgtggccggcagtgccgtgtttcgccggtgtgaccgcgcggccgccatcgccgccatccgcaatgcttgattcaggacggtattcccatgtcattttttccgaatgcacttgaaaacctcatcgaccagttcgccgcgctgcccggtgtcgggcgcaagagcgcgcagcggctggcgtttcatgttctgtccctcccggaagaggaggcgctgaagtttgccgcggccattgtggacgccaagaaaaacatccactgctgcagcatctgccagaatctcaccgatcaggagacgtgcaccatctgcgcctctccgaagcgcgaccagagcaccatctgcgtcgtggcacagccgcgcgatgtgctctcgtttgagcgtagccgcgagtataacggcgtctatcacgtcctgcacggcgtgctgtcgccgatgaatcacattggcccggacgatatccggatccaggagctggtcaagcgtgtggctgccggcgggatcacggaggtcatcatggccaccaaccccgacacggaaggtgaggcgactgcgatgtacatcgcgcgcctgctcaagccgtttgacgtgaagatcacacgtctggcttacggcattccggtcggctccaatctggaatatgcggacgatgccacgctcctgcgggcgctggccggccgaatggaaatgtaacaggtttgacggctcggatttctgggaatactctggttatccgccgccgcgggcaatgcatttcgtacatatttttcgaaaaatcaaccagcttccgggggagcagtctgcccgaaagcgaacgtaaaggagatacgaatggcatccaaattgaaaatcatcccgctcggcgggctcggtgagatcggcaagaacctcaccgtttacgagtatggcaaggatatgttccttgtcgactgcggcatgggctttccggatcaggacctctacggcgttgacatggtcatcccggacatcagctacctgaaggccaacaaaaaccgcatccgcggcatggtcatcacgcacggacacgaggaccacattggcgcgatcccgtatgtgctcaagcagcttgacatgccgatctatgcaacgcctctgacggcggcgatcattgagctcaagctcgaagagcatgacctgctttaccatacgcagatcttcacgaaaaagccgggcgataagtttaagctcggctgcttcgaggtggagttcatccatacgaaccacagcattgccgattccgttgcgctggcgatcaaaacgccgatcggcaccgtcatccacacgggtgacttcaagatcgacctcacgcccattcagggcggcatgatcgacctgccgcgtctcggccagctcggcaacgagggcgtgctcgcgctgctgtcggactccacgaacgtggagcgtcccggctactgcgcctcggaagcgcgcgtgatcgactgctttgatgagctctttaaggactgtaacaagcgcatcatcgtcacgacgtttgcgtccaatgtccatcgcctgcagcagattatcaacgtggcggcaaagtataagcgcaaggtcggcatcaccggccgcagcatggaaaacatcatgcgcgttgcgacggagctcggctatgtggacattccggacggcgtcatgatggacatgtcgcagatcggcagcctgccgcgcagcaagaccgttatcgtctgcaccggcagccagggtgagccaatgtctgcgctgcaccgtatggcgttttccgagcacaaacaggtcacgatcgacgccggcgaccgcatcatcatctctgcctcggccattccgggcaacgagatcacgatcagccgcgtcattgacgagctgtttcagaagggcgcggaggtcatctatgaccgcaacacgccgctgcacgtctccggtcatgcctgccaggaggagctgaagatgatgctcgcgctgacgaagccgcgttactttatccccgtgcacggcgagtatcggatgctgtgcaagcatgccgagatcggcaaactcatgggcgtggagccgaagaacgtgctcgtggctaaaaacggcgaagtgatcgagatcaccaagcgcagtatgcgcgcgacgagcaatgtcccagcgggcgatgtgtatatcgacggcaccggcatcggtgacgtcggcagcgccgtgctgcgcgaccgccgtcatctggccgaggacggcatcgtgatggccatcatcacgctctcgtccgaaaacggcaagccggtcgctgatcctgagatcattacccgcggctttgtgtatgtcaaagaggcggaggcactcatgggcgagctcaagcgtgtcgtgaatgaaagccttgccagctgcgagcggcagaaacagcacgactgggcgaccatcaagggccgcgtgaagtcgaacatcagcggctatctgtataagaccacgcgccgcagccccatggtgctgcccgtgatcattgaagtctgagcaggggagtgcgccatgaagatccagatctggggcaaatccaaatgctttgacacgaaaaaggccgagcgctattttaaggagcgccgcatcccgtaccaggccattgacctgctgcgctatgggatgagccgcggcgaactgacgagcgtgaaaaatgctgtcgggctggataccatgctcaatcccaaggcggcggactacgcgcttgtgcagcacctggcctatgagcaggacaagatcgagcggctgctcgaagatccgtccctgttgcagacgcccatcgtccgcaacggccggcaggccaccgtcggctattgcccggatgtgtggaagacgtgggaataaaaacgggaaaaagcccgatatggcgctggccatatcgggctttttgctttgtttttaatgctttgcctgctcttcgcggatcgcatcgcgcatccgctccagaccggtctgaatgatcgcgcgcggcatcgcaagattcaggcgcacatagccttttgcgttgccgacgaagagagaatccccgccctcgagcagaacgcccgccttgttggcgaagaagtccggtaggtccgccacgtccggcaggcagcgcgacagatcgacccacgccagatacgtcgcctccggaatgtacatgaccgcctccggcagctcctgggacagaaacgccttgacgaatgcgaagttttcgtccaaatactgctttagtgcttcatgccacgctccaccgcgcgaataggccgcctgcgccgccgtcagcgacatggggttgaccatgccgaacagcttgtcgcgctcctgaaaacgggcgcgcagcgccggatcgcggatgatgatattggaaaacgcaagccccgccatgttaaaggtcttggtaggcgccatgcaggtgatgagcttgggatagcgatccatgacctttgccatcgggatgtggcggcggccgcagcggatcaggtcacagtggatctcgtcggacaccacccagaggttatacttttcgatgatcgcggcgaccctgtgcagttcttcctctgtccacatacggccggtgggattgtgcggattgcaccagaacactagcttgcacgcgggatcggcgcacttgcgctcgaagtcctcataatccacctcgaatgtgccgtcagccttcttgtgcagcggggaagtcagcacatccacgctggcatactccgccgcgtggaggaaataaccgtaggccggcgtgttgagcagcaccttttcgtccgggccgcaaagcgtttccgtcagctggtagagcgccgggatgatgcccggcgagacgcacagctgctccttgggaaagctccagtcatagtgatcgcggcaccacttggagaacgtgcggtaatattcgtcgtcatacaggccggtatagccgaagatgcggcggtcgatccgcgcgcgtagcgcatctaggatctccggcgcaacggcaaattccatgtcagcgacccacatgcggacaaattcttcatccttgaaggcaaataccttttccggcccggcgtgaaaaatatagccgcggaagccatccgtgttgagcgcgttggtgtggcggcggtcaatgatctcatcaaaattgtaggtcatagcgatcttcctttctgtgcacttgcagctgcatccggctgcacagccattatagcagagatttgagagaacaggcaaccttgctgcggaagaaaaaagcactatgtgcgcgatttcccacgcacatagtgctgcaaaatggtttgattttgctctcagctgaagttggcgctgccgccgttggtcgggatcacgccgacataggtcgtgccgcgcgagaggttcagcgccgtgccgtcctcgagcgtgtaagtaaagcagctgttgatatcgctgcgtgcccacttgatcggcacatacttgccgccggtcacaaagtagccggtgccgctgccgatgaggtcgacggccaggcggccgtagctgtccaccgttttcatatcggccgagaggatgagcagattggtaaacgggaccgcttcgccggtcgcgccgtccttatagtcggccttgtactgcacggccgtgtacttgccgctgtcagcgtggtaggtgaaggacgtgctcttggacgtgttaaacgtcacctgcacgttctcggccgcgccgccggtgcactggtcgacagcattgtcggcaaagttcaggccggtcttgtagctgctctcatgctcggtgcggaacttgtaccgatccacgagcgcttccacgttcgcgccgtggaagaacagcgtgtgctccgagccgtgctggccgcggctggcgtcgcggtagaacatggagctggtgttgccgtcgcgcacgccgtccagatggtcggcgttataggtcttgacgtcgctgtaggcctgctcgctgccgccggcgtggatgacaatggcgtcatacgacagggcgacgctcagataatacgggcgcaggctgcggatgctgccgacggactccacatcgtacaggtggctgaaaatggccatcatgcgcgtgatgccgccctcggccgggatctcgtagatcatgtctgcgttgctgatgccgacctgcggctgcgcgtagacgatgttgttgatcatgacggcaaacggccgggtgtttgcgggtttgctgctcagcggttcaccggtcagcggggcatagtagtgctcgtttttcgcgtcggcaccgttgacggacggctcctcggattttttaccgcagccggagcaggcacaggcgagcagcgccacggcgagaagacaagcaaaaatgcgattgaaacgtttcaaaacgcaattccctcctgttacaataatttggtcaacgttcatgatacacgccttgcagaggattgtcaaatgccccgtaccgtgctacaatggaaataagaatttttaataactgtctggagatgaccattcatgtatgaagagatccgcaaatccgcccgcgctgcgctgcttgaactgctggacgttgccgcgctcacgcccggccagcaggtcgtgatcggctgctcctcgagcgagatcatggggcagaagatcggcaagggttcgacgcccgaggcggcaaaagccgtggtcgatgagatcctgccgatcctgaaagcgcgcggcctctgcctggaggcgcagtgctgcgagcacctcaaccgcgccctgatcatggagcgcgccgacgcggagcggttcggatacgagatcgtctgcgtccgcccgcggccgaaagccggcggctcgttcgcaacggcggtctatgaggcgatggacgatcccgtcgcggtcgaatttgtgaaggccgatgccggcctcgatatcggcaataccatgatcggcatgcacctcaagcatgtggctgtaccactgcgcctgtcggtcaagacgatcggagaagcgccggtcaatgccgcccgcacgcggccgaagctcatcggcggcagccgcgcagagtatccggactgataccgggcaatccaacaaaaaagtgaaaaagcgcatcccccagcaatgccgggggatgcgcttttgtgttctgtgccggaaattacgcgcccttgtgcatcaggacggtcagcaccagcgtcaggacaacaaagacgaggccgaaccacttcgtcgccttggcgagcttagcatcgagcgtcttggctttgcccttggaaaggaacgtttccgcgccgccagcaatggcgccggacaggccggcgctcttgccggactgcatcagcacgatcacggtcacggcgagaccggaaaccagctggataatcgtcagaatcagttccaaagtagtcatggtattcatcctttcatggtaggggaaatcatctaatataacggagttactatatcacaacatctggtgcattgcaagagactttttgcaaaaaatgctgctttcttgcatctattaagtgtccagaaagtaatcgctgtcaatgcgtttgatttgatatgttttttgcgctgatacacccaaattatattcaatcatgagttcggtcaacttttcaccatcaacaagaatgatatgttgcgcgttcgcaaaatctcttgcaccttgagaaaacttggcagtcgtaataaaaagccctttatccacttttggcggtcccatcatcgcaccggcaaatttctaaatttccggctttccgatggtcgtgtccgtggcccagcgttttgcctgaatataaatcaagttaaacccaagcttatcttcgtgaataatgccgtcaatcccgccgtcaccacttgtttttgtaacaaatccgtcgccatatcccatagctttcattaaatctacaacaagagcttcaaagaatgttggcgtttgatccataatagcagcaagcagttcatctgccagctgctcattgatgatggaatagactcgctcaaatgtttcctgcggtgtttcggaagcatcccgctgcactgttgcatcggaatcggtattttcgctcttttttccttttacaaacgcttcaaaggcgggataatgctgctgaagatagtgatttgtaatatcaacatcactttctagcaaacgcttcccctcatcggttatttgacaatggccctttttcggcgcgatcacaagtcctgcttttttcaagtatgtatttgcccaaccgacccttgtcgaccagacggattgcatactgttagaaagcaaaagtgagagatcatcttctgaaaggcaaagataggatgccagcttggccttaatttctcttgtagaataaacagcaccatcttgtattactgttagaaaaggaagatatagctcattatacttcggtaaagacattttttcaccgccttattcagatattctattcagcagtgccacagtctcaacagttgtttcagtttccaagggaagttctttca

SEQ ID NO: 13961 - DNA, 11960 bp, Unknown
  gut microbiota DNA sequence
gctcccggggagtcgaagttcatccccggcaggggaaatccccgctggagcaccaaaaatctttcatctcaaaaggatggactttccaccgcgcccgtgataaaattgaataaacagtcgaaaaaatcaaatacaggaaagtgagtgcgtattatggattttatagaccagctcaaacaatttgctaagcgtgtggacactctgaaagattctatccagacagaggaagccacaaaaaccgcaattattatgccgtttttctctatgcttggctacgatgtttttaatccgcaagaattcgttccagagtacactgcggatgtaggcattaaaaagggtgaaaaagtcgattacgccatcatgaaagacgacacacctgttatcctaattgaatgcaaatccatatctgaaaatctggagcgccatgactcccagcttttccgctatttcggcacaacggatgcaaaatttgcaattttaacaaacggtctcatctatcgcttctttaccgatctggataatcccaacaaaatggatagcgacccgtttttgagcatcaatattcttgatatccgtgaaaaccaggtgcgtgaactcaaaaaattctgcaaatcagaattcgatattgattccattttcagcactgcatcggaactgaagtatgtacacgagtttaaaaaccaatttgcggagcaggtagaaaatccgtccgatgaactgacgcggcttttcctgcaagggtgctacaccggccaaaaaacgcaggctgtcattgaaaagttccgacccctcctgaaaaaagcgctcaatgattatatcagcgagacgatgaacgataaaattaaaaacgcgctcggcggctctggcggcagcgtttccgtctctgaaaagcccgcggcggaagcggtaagtacagaaaaagatgcggatgttcctgacagcaacgaatcgaaaatcgtgacgacggaagaagaactggaagcctacttcatcatcaaaaacctgctgaaagacgtcgttgacctgcaagacattacatataaggacaccgaatcctatatcaatattctctacaagaaaaatacccgcaaatggatttgccgcttaaagctcaccgacacagtgaaaacgctgattgtgccggacgaggagaaaaagggccaaaaatttaacctgacaagtgtatatgatctggaacaatacaacgatctgctgcacaaaatattggctcgttatatgtgattccagcatgaaaaagagggatgcaaagttgcatccctcttttcagcggtgcttgccatcccgccaaaatgcacgtataatcggggcatcgagacaagataaggaggaatccgcatggaaaacacactcaaacagaaacttgccgccggcgcgcagcccatcggcaccttttttgacaccgccagcgtgagcctcatggagtgcctcggccgcacggggctcgactttgccatcatcgacaacgagcactcccccatcgaggctgagaccaccgccgcgctcgtgcgcgccgccgagctgagcggcatctgcccgctcgcgcgcgtgcgcgagatcagccgccccgccgtgctcaagctgctcgacgtcggcgtgcagggcctgatcgtgccgaacgtcaagacgctcgagcaggtgcaggagctcgtgaactacgcgaaatattaccccatcggccagcggggcttctgcccgtcgcgcaaggacggctggggctttgacgggctcggctccgtgccggagaccatgcgccacttcaacggcgagaccctgctcttcccgcagtgcgagaccgccgaggcgctcgatatcatcgaggacatctgcgccgtggacggcgtggacggcatcttcgtcgggccgtttgacctgtcgatctcgatgggcatgccgggacagtttgacgcgccggaatttcaggcggccatcacgcgcatcgtcgccgcctgccgtgcggccggaaagtactgcatgttcttcaccggcacggccgacggcgtggtcgacggcttccgcaggggcttcgacgccatggcctacagcctcgacgccgcgctgttcattcagggcgtgaagcgcgatgtggaggacatccgcagccgactgtaaaaagatatgaatatagcaaaggcgcgcaccagccggtgcgcgccttttttgcatacctcaatgcttatccccgcagaaggcagcctcgtcgttcgaccagccgcgatcgagcagccagtaggtcgtctcgtcatccgccgccatctcgtcgtccgtcagctcgcggtcctggtgctgtcggccccacttgagcagctcataattacgcagctccttgagcgtgaagggcaggcccaactcctccgccaccggcaggagcacgtgctcggtcatcacgtcccggatctcgagactgccgggatagctgtccatcgcctgctgcacgcgcgcctgcagggcagggtcggcatcataaatctcaaagaacttatccacattcgttttcggtttgtctgccatatcggtcactcctgatacaggtattttcctgcattatactacaccccgcgcccgcgcgcaaggcgcgttcacgcctccggcgattcggccagctgcgcgagcgcgctgcgcaccgccgcgatcacgaacgcggaaaacgtgcagtccttacccgcgatggccgcctccacgtctgcaatgacatcgtccggaaagcggatggtcttgttcgtcgtgtgcggcgtgcgcggtatctgaaatgctgccataatgccgctcctttcttcgttttttcatgattgtacggcgttttgcacccgttttatgcattgcatttgcgttgcgttttgcgttataatcaagaaaaagcggaaggagcggaacattatggatatgaacaaactatataaaaaggcatatattgttttgttcaactcgatcacagatgcactagccgcgcccgaaatggccgaacacatcctcaaaaacgcgcagcaactggctgaagagatcatcctcacgggcgcagactgaccgcccgcacccgcgcgcaccctgccgaataccatgggtacgggaggcaatcgcctccggaggaaggggaagcaaccatgacacagatccaaacgctcagcgagctgctgcccggccagagcgcgaccgtgcgcagcgtgtgcgcgcccgacgggatgcagcggcggctgcgcgacctcggcctgatcgaaaacacgcgcgttgtctgcctcggccgcagccccatgggcgacccgagcgcctatctcatccgcggcacggtgatcgcgctgcggcggtgcgactgctgcggcatccgcgtggccgtgccgtaaagggggtgcgcgcatgggactgacgcaccgctctgttggcgcgcacgcggccgcgttcggcggcacacgccgggcgggcgagcgcgtcgtggcgctggcaggcaacccgaacgtcggcaagagcaccgtcttcaacgccctgaccgggatgcaccagcacaccggcaactgggcgggcaagaccgtcggctgcacgtgcggccgctgccgctcggcgcgggagaactattttttcgtggacattccgggcacatactccctgtgcccgcactcggcggaggaggccgtcgcgtgcgactttgtgcgcggcggcgaggccgacgccgtggtcgtcgtgtgcgatgcgacgtgcctggagcgcacgctcgtgctcgcgctgcaggtgcgcagtgtgacgccgaacctgatcgtgtgcgtgaacctgctcgacgaggcgcggcgcaagcgcatcacgatcgacctgccggggctgcaggcgcagctcggcgtgccggtcgttggcgtgacggcgcgaaaaaagaaaacgctctctgccctgctcgacgcgctcgacaccgtcgcggcggcgccgcagccgcaaccggacgcagcgccgccggccgaccctgcggatgacgtgcgccgggccgaggccatctgccgcgcgtgcgtgacttacggcacggccgaatatgccgcgcgcgaccggcggctcgaccgcctgctcacgagccgggcgactggctaccctgtcatgctgctggggctggcgggcgtgctgtggctgacgatcgcgggcgcgaacgccccgtcggaatggctggcgcgcgcgctcggctgggtgcaggcgcagttttcggcattgctcacggtgctgcacgcaccgctctggctgcaggggctgctggtggacggcatgtttcgcacgctggcgtgggtcgtggccgtgatgctgccgccgatggccatctttttcccgctgtttacgctgctcgaggacgcggggtatctgccgcgcgtggcgtataacctcgaccggccgtttcacacctgccatgcgtgcggcaagcaggcgctgacgatgtgcatgggtctcggctgcaacgcggcgggcgtggtcggctgccgcatcatcgattccgagcgcgagcggctgctcgccgtgctgaccaatagcctcatgccgtgcaacgggcggtttccggcgctcatcgcgctcatgaccatgttctttgccgcggccggcggcagctcgctcgtcagtgcgctgctgctcacggcggcgctcgtgctgagcgtggggctgacgttcggcgcgacgtggctgctgagcatgaccgtgctgcgcggcagaccgtcggccttcgcgctggagctgccgccgtaccgcgcgccgcaggtcgggcaggtcatcgtgcgctccgtgttcgaccggacgctgttcgtgctcgggcgcgcggccgccgtggccgcgccggccgggatgattctttggacgctggcaaacgtgcacatcggcggcgcgagcctgctggcgtggtgcgcaggtgcgctcgacccgctcgggcgggtgatgggcatggacggcgtgctgctgctggcattcgtgctcggatttccggccaacgagatcgtgctgccgatcgccgtgatggggtatctggcacagggcagtctgggcgattcgctcgggctggcgcagatgcacgcgctgctgaccgccaacggctggacgtggacgaccgccgtgagtgccgtgctgtttttcctgctgcactggccgtgctcgacaacgctctggaccatccggcgcgagaccggcagcataaaatggacactgctggcggcgctgctgccgacggcgatgggcatggcgctgtgcacggcgttcacagcgctggcacgcgcactcggctggtgagcggattaggccgcggccgccgggacatactagccgcaagacgcaggaaaggaagaagcaagtgacccgaccgaccacggaggagctggcacgccgcgcgctcgagtccgtcgcccgggcgcacggcgtgtctgttgccaatgtgcacgccgccgtgcgcggggcggcagagcacacgaaagccctcggcgcgctcgcgccggaggagctggtggcatatctcgcgcacaagagcagaaaccgggagccgtaacggctcccggtttttttgcctgtcggaaaaccccattggggttttccgacaaaaggcttacagtctgctgcgcgcagaatttgtgcgccgatggcacacaaattccacacttgcagcctgagcggtattttctctgccgcacatgtcgccagagaaaatgatttcacttttttgccgcctgcgggcggcaaactctgcgaggcttcttctgtgcggggccggtgctttcatatgctcccggttttgtcatgccgcggcgaaaatcgccgttgtgccggggcgcggttcggattataatggaagcaccacaccgcggcccggccgcgggaaggagcggaccgacatgaaatttcttcacctcgccgacctgcacctcggcaagcgggtcaacggcttttcgatgctggaggatcaggcatatatcctgcggcaaattctcgccattctggacgacgagcggccggacggcgtgctgatcgcaggcgacgtgtacgacaagcccgtgccgccgaccgaggccgtcgagctgctcgacggatttttgaccgagctgtgcgcgcgcggcgtgcccgttttgctcatcagtggcaaccacgactcgccggagcggctcgccttcggcgggcgggtcatgggcagctgcggcatccacatcgcgccggtctacgacggcgcggtcgcgccgatcgtgctgcgcgacgaaatcggacctgtgtacctgtggctgctgccgtttttgaagcccacgcacgtgcgccgctggtttccggatgcgcagatcgagagctacaccgacgccgtggccgccgccatcgcgcacatggacatcgacgacagcgcgcgcaacgtgctcgtgacgcaccagttcgtgaccggcggcgcgcgcagcggctcggaggaactgtccgtcggcggaacggacaatgtggacagcagcgtgttcgcgccgtttgactacgtggcgctcggccacctgcacggcgcgcagcagatcggccgcccgacgatccgctacgccgggtcgccgctcaagtactcgttttccgaggcgagccagcgcaaatccgtcaccgtcgtgacgctgggcgaaaagagcgcggtcgacgtgcgcaccgtgccgctgacgccgctgcgcgacctgcgcgagatccgcggcagctacgacgagctgaccgcgcggagcttttacgagcacacgacctaccgcagcgactacctgcacctgatcctcacggacgagcaggacgtgttcgacgccgtggggcggctgcgggcgatctatccgtacctgatgacgctcgactacgacaacgcccgcacgcgcgccgccggggcggtggcagcgccggcagccatggagcagcgcacgccgctggagctgttcgaagcgctctacttacagcaaaacaaccagcccatgagcgacgagcagcgcgcgttcgcggcgcagctcatggaggagattcaggaggcgcagccatgagaccgctgaacctgaccatgtccgccttcggcccgtacgccgggcaaacgaccgtggacttttccgtgctcggcacgtccgggctctacctcatcaccggcgacacgggcgccggcaagacgacgatctttgacgcgatcacctacgcgctctatggcgaggcgagcggcgagagccgcgagagctccatgctgcgcagcaaatacgcagcgcccgaaacgccgacgttcgtggagctcaccttcttaaacggcggcaagacctacaccgtgcgccgcaatcccgaatacacgcgcccgaaaacgcgcggcacgggcacgaccgtgcagaaggcagacgccgagctgacgatgccggacggccgcatcatcaccaaggcgcgcgacgtgaccgccgccgtgacggacatcgtcggcgtcgaccgggagcagtttgcccgcatcgccatgatcgcgcagggggaatttcgcaagctgctgctcgcccagacggacgagcgcaaggccatcttccgccagatcttccacacggggcagtatcaggcgctgcaaaaccggctcaaggaggaagccgccgcgctcgaccggcagtgcggcgagctggaggccgggctgcgtcaggcggccgggagcatccgctgcgacgcgccggagacactgccggacgcgctggacaccgacgcgctgctcgcggcgctggacacgctgctgcgcgccgacgaagccgcgctgacgcaggcgcaggcggagcacgcgcagacggagacacagcgcgagcaggtgctctccgacctcggcaaggcggaggcacttgaggccgcgcgcgggaaactcgccgaagcggagagcgcgtggacggaggcacaggcggaaatgaaggcggcacaggcggcgctggacaccgctacggcctcgcagccggagatccggagccggcggcaggacatcacgcggctggaggacgcgctgcggcggtacgaacagctcgacacactgcgcgcgcaggcggaggcggagcgcaaacggctggcgcaaaagcgaagcgacctcgacgcggcgcgcgcccggacggacgcggccgcgaaggcactggagaccgcgcgcgggaaactgagcgggcagccgaagctggccgtggccgccgcgcaggccgggcacgcgcaggacgcggccgcgcagcgctgcgcgcagctggcggcgctggagacgcagcggcagcagtgcgccgagctggaaacggcgctcaccgccgcgcaggcggaatatcaaaaagcggccgaggccgcgcaggcggcgctggcgcactacggcgcgcaaaaccgcgcctatctcgacgcgcaggcgggcatcctcgcgcgcacgctcgtgcccgggcagccctgcccggtctgcggcgcgacggagcacccctgccccgccgccgcgccggaacaggcgccggacgccgccgcgctcaagcgcgcgctctcggacagcgaccgggcacagaaaacggccgcagagcgcagcgcgcaggcggccggtctgcgcgggcagctcgacgccgtgcgcggcgcgctctcgcaatcgtgccgggcgctgacgccgccgctcgacccggacacgctggcggagaccctccccgctctgcgcgcagcggctgcgcgcgacgccgaagcgctcgcagcgcagcacacggcgcagcagcaggcactctcggcgctgcaggcgctggaggccggcctgccggcgcaggaggaagcgctccggcggcagcaggcagacatacaggaacgcgcgcaggagctgtccgcacgtgcggcgcgatgcgcggagctggacgcggaggccgaacgccgcgcacaggagctgccgcacgaaaaccgcgcggcagcgcagcgcgcgctcgtcgagacacgcacgcagtgcgaggcgctgcagcaggcgctggacacggcgcgcgaacgcagcagcgcggcacagtccgtgctcgccgcgctgaccggaaagcgcgacgcgctgcgcgcacagatccaggccgcgccgccggcggacatcgccgccctgcgcacgcggcgggatgcgctgaccgtgcgcgccgagcagctgcaaaggcagatcagcacctgtgatgcgcgcctggagcaaaaccgcgcggcccgcaccgccatcgacacgcggcggcagcagcacgccgccgtgcgcgcgcgctggcaatgggtgcacgcgctggccgcgacggccaacggcgccgtgcccggcaaggaaaagatcatgctcgagacctacatccagaccgcgtacttcgaccgcatccttggccgcgcgaacacgcgcctgctcatcatgtccggcgggcagtacgagctgcgccgctgcgcccgcgcgggcgacaaccgcagccagaccgggctggagctggaggtcatcgaccactacaacggcacggcgcgcagcgtcaagacgctctccggcggcgagacgttcgccgcctccctgtcgctggcgctcggcctgtccgacgaggtgcaggcaaccgccggcggcgtgcagctcgaggccatgttcgtcgacgagggcttcggctcgctcgacagcgaggcgctgcagcaggcgctcgccgcgctcgtgggcgtgtcgggcggcagccgcatcgtgggcatcatctcccacgtggcggagctcaaggaccgcatcgaccggcagatcatcgtgacgaaagaccgcagcggcggcagccgcgtgcaggttcaggcataaagcaaaaaagccccggcagccgaagctgccggggctattctctgaagcagtatcactccacgacaaacagcagataccactgcccgtcgacctggacgaactcgaaataaaagtcgttgtcctgcccgttttgatacgtcacgtcgcaggcaacgatgacattgtcgtcgatgcgcacgccgagctcgcgctggagctcgcgcacgtcgctggcgtcgagactgtcgtcgtcatagacgtaataatcatcgatggccttgccgtagtcataataccagtcgtcgagctggatgagggcggcctcgcggccggcggcggtatcgtcgtcctgcatgtaggtgataacctccggcaggaagagatcgagcatggcatcggtgtcatcggccttgaaatacgtgaagtagcgctcgaggagccggtccacctccgcgccgccggccgtgctgggctcgcccgcctgacgggcagcgaaaatgccggccacgaccgccacgatcacgaccagcgcggcaaagccgcacagcagaccgatgagcagcttcttcggcttgtgcttcgggccgatctccggcgaggagaccccgccgccgggcgcaggcgcataccagtcggcctggccctggggcgcttcgggcgcgggcatgccgcaaacggtgcaaaaacgcgcgccgggcgcgagccggcttccgcagcgcgggcaaatgcccgggccgaacggagcggccgcgccggtgtaggacgcgttcgccgtgtcctgctgcggcggtgcggactgtgccgggccggcggaagcggatcgcgttgtgtcggacggagcagacggttccggcgcgggtgcgccgcagttggtgcaaaaacgaacgccgtcatcgagcggcgcgccgcatttcgtgcaggtgcgcggggcggcgggctgcgcggacgcagtgggttcggccggctgggatgccggcgggtacggcgctttcggggcgacgggctgctcgggcagcatggcgccgcaggcgcggcagatcacggcactgtcagacagctgcgcgccgcatttcgggcagagcatggcaagacctcgtttctgtttcggattttttctcattgtaacatccggctttcgattttacaatccattctttgcgtgttatactcacattatcttctattctgattttttccggaggcaacagatccatgaacatcactgccatcatctacgacgccgacgcgcgccgcacggcctacatcctcggcacggtcatcggcaactgcaagctctttcccgccgagcgcgccccgcgcgactggagcgggtacgcaaacgtcatcaccgtcaccgcgggcgaggatggcccggtcgtgaccgccgggctgcaaaagcgcgtgaccttccgcccgaagggcgaggacgagaccgtcgccgcggccgagctgatcgccaaggccttctgcccgccggaggccccgatgccgacggacgcgctcaaggcgcgcatcgacgcctttctggaggcgcacaacacgctcgcgctggcgaccggctgcggcaagtgggtaaggtgcacgccgctggaatacctgcgcgtggacggcaggctctacatccttaccgagggcggactgaagttcaagggcatctggtggaacggggcgatctccgccgccgtgtttgacagctacgcgggcatggcgtcgctcgccgggctgcagatgacgggcacggccgtgtacatcgacccgctgagcgacgaataccgcagcgtgatcgaggcacgcggcgtgcagctgcagcagctgcagcagatgcccgcgatgctgcacgcggtgcggctggacatcacgcgctatgagctgctcgacggcgcgctacgcgccgatggctacgccgcgcggcaggtgctcgatctgggctgatgtattctatttttccatctgtgccatactatggttagggagctcccgctccgaaaccggacacagaggaaggtgaaacctttgcacaaagcaggcacgcagccggccatcccggtcgggctgggtatggcgctggtgcacaaccagcaggcgctggcaaagttttcggcgctcacggacgaggaaaagcgcgcattcatcgcgggcgtgcacggcatcgactcgcggcaggagatgcgcgcgtatgtcgaccggttcgcagaaagctgaagatacccccgctgcaaatgctcatgtacggtaaagaagcaagcaaccg

SEQ ID NO: 13962 - DNA, 60663 bp, Unknown
  gut microbiota DNA sequence
acccaacaatatctttaattaagggagaacggccgctctcgcccggacgtagagacgctgcagcggctcgcggacacgctcggcgtagagctcacggagctgctggacggggcgccgtccgccgatgcccgccgggcggcgctgcgcaggctgtgcatcatgggggccgtcacgctcgtgctggccgggctgtgggcgtacctgcacgcggtctgcctccggcagtaccagcacggggacatgacgccgttggcagccatgctcataaccgagccgctgctgctgtgcgcgctggcgtggacactgctgcaggcgctgtgcatggtcacgcgcctgcggccgcggcgcggcgcgccctgggtgcacccgctcgtctgggcgctgttcggcctgtggctggcgtttctggtcgtcagcgtcgcgctgcccacggccggcgtgatgctgccgcgcctttacggcggccgtgccgccacggcagcgctgtttttcctcctcggcgcgctgctctggctgacgcagccggacgccgggccgtaaaactgcacaaaggcaaccggcagaagtgcgcttctgccggttttttgccggtttcgggaaaatgtgcccgcgcgcccttgcaatccgggggcagacgtggtatattgttctcgctcgaaaaacatctgtccgctatacgcgggcaattttcatcaaaacaaagtgagggaacatcatgaacatcggacttctgggctttggcgttgtcggcaggggcgtttacgatatgctcgccggccgggacgatatccgcgcggtgtgggtgctgtgccggcgcgatctcggcgagctgacggcccgaaccacctacgagatgcaggacattctcgacgacccggcggtggacaccgtcgtggaggttatgggcggcctgcacccggcgtatgaatacgtggcggccgcgctgcgcgccgggaagaacgtggtgtcctcgaacaaatacctcatgtgccggtactacgacgaactcaccgcgctcgccaatgagcacggcgcagcactgcggtgcacggcggcggtcggcggcggcatcccgtggctgacgaatcttgaaaaggccgcgcacgccaaccacatctcccgcgtctggggcatcctcaacggcacgaccaactacatcatggacgcgatgcacggcagcgacgccgactttgccgacgtgctcgcgcaggcgcaggcgctcggctatgccgaggccgacccctcggccgatatcgacgggctggacattcagcgcaagctgatcctgtccgccaacgtggccttcggcgtgtcgctgcgcgaggcggacgtgccggtgttcggcatccgcaatgtgcgcaaggcggacatcgcccgctttcaggcgcacggctgcacgtgcaagctgatcgcagcggccgagcagaaaggcggcagcatccgcgcctacgtcgagccgacgctgctgagccatgacgcgctcgaggcagccgtgcccgcgaacttcaacctcatcagcatggagggcgaccgcatgggcgtgcagagcttcttcggtcagggcgcgggccgctacccgacggcctacaacgtcgtgcaggatctcgtggatatccgccgcggcgtgcatgcgttttacaccgactcgttcgttccagccgtaccggacaattccggcgtgcagcaccgctactacgtgcgcacgcgcgccgcgctgccggagctggccgccctcgccgagggcgactgggacggtgcggtcatcacgcagcccgtgcccgtgagccggatgcacgcgctcatggcgcaggcgctggtgcaggacagcgagagcttctttgccgcgctgcagtaaggagggccccatgctgaaggttgcaaaattcggcggctcgtcgatggcggacgccaagcagtttgaaaaagtgcgcgacatcgtgcgcgccgaccccgcgcggaaggtgatcgtcgtgtccgccgccggcaagcgcagcgcggacgaccacaagctcacagacctgctgtacctgtgctacgcgcacctgcagtacggcgtgaactgcgacgccgtctttcagatgatctgcgatcgctacatcgccatccgcgacgaatgcggcctgaacgtcgatatcgaggccgagctcgacgtgctgcgccggcagatgcgcgccggcatctcggaagaggagctcgtgtcgcgcggcgaatatttctccgccctgctcatggcggactacctcggctactcgtttctggacgcggagctgtgggtgcgctttcagtttgacggctcgatcgacaaggaggcgtcctacgccgcgctccggcggctggccgacgggcgcagcgttgtcatccccggcttttacggcgtgacgcccgaccgcaagatccgcaccttttcccgcggcggcagcgacatcaccggcgcgctcgcggccgcggcgctcgatgccgacgtgtacgaaaactggacggacgtgtccggcatccttatggccgacccccgcatcgtgcccgacccgctgcccatcgagcgcatcacctataacgagctgcgtgagctgagcttcgtcggcgcgcaggtgctgcatgagggcacggtcttccccgtgcgcgagaagaatatcccgctcaacatccgcaacaccaacgaccccgaccaccccggcacgctcatcatggagtcgttcgacgacgtggacgacggtcggctcatcaccggcatcgcgggcaagaaaaactactctatcatcacgatcgccaagtccggtatgtcctcgagcgtgggcacgttccggcatgtgttcgaagtgttcgagcgccacggcgtgagcatcgagtacgcccctagcggcatcgactgcctgtcgctcgtcgtctcgagcgaaaaggtcgccccctgcctgtactccatcctcggcgagctggaaaagcagctgcacccggacaatctgcacgtgacggagaacatctccatcgtcgcggccgtcggccggaagatggccttccgccccggcacgtcgggccgcatcttcgccgcgctcggcgagcacggcatcaacatccgcatgatctcgcaggggccggatgagctcaacatcatcgtcggcgtggatacgaaggatttcgcgcccgccatccaggtcctgtacaacagctttgtgaaataagaaaggaagttttcaaatatgaagcagtatcgcgtagccattctcggcgccagcggcgccgtcgggcaggaaatgatgaagatcctcgccgagcgcaagttccccgtcggggagctgcacttgctcgcaagcgcccgctcggccggcaaggtcgtgtcgtggcagggacagaatatcgccctcgaggaggcgacggacgccgccttctccggcatggacatcgtcctcggcgcggcggaaaacgacattgccgagcgcttcgcccctgcgatcgtgcgctccggcgccgtgttcgtggataactcctcggcctttcgcttggacccaaacgtaccgctcgtcgtgccggagatcaacgccggagacgtgaagctgcaccacggcatcatctcgaaccccaactgctcgaccatcatcacgctgaccgccatcaacgcgctgcgcaagctctcacccatccgcgacatggtcgtgtcgacgtatcaggccgtatccggcgcgggcgcgggcggcccgatcgagctgcaaaacgaggtcgacgccctgcgtgccggcaagagctacgcgccgaaggtgttcgcgcaccagatcgcctacaacgtcatcccgcagatcggcggcgagcagtgcgacggctacacctccgaggagatgaagctccagaacgagggccgcaagatcctgcacctgccggacatgaacgtctcgtgcacctgcgtgcgcgtgcccgtcgtgcgcagtcactccatctccgccgccgtgcacttcgtgcaccacatctccgttgacgaggcgcgcgcggccatcgccgccgcccccggctgccgccttgtggatgatctcgacgcgctgcagtatcccatgccgctcgacacgtcggatcaggatctcgtgttcgtcggccgcatccgccccgacctgaccgaccccaacggcctgtgcctctggtgctgcggcgatcaggtgcgcaagggcgcggccaccaactgcgtgcagatcgcggagctgctgatccaaaacgcctgaaaaagcaaaacgcccccggcggcttcttcttgaagccgccgggggacgttttgcgatacatggcgacaggatccgcccccttgcgcaagcggcgcgggtgtggtatccgccgcatccggcacacggtcatggccggtgagtcggacgactgaaaaggaaaacgccgcggaggcttccgcggcgtttttgttatcccctgagctgctgcgcgtattcctcctgcggccgcaggcggccgacggccgagaacgacacgcggtcaaagtccagcgtctcgcgcgcaaggccgaggatgtcctcgcgcgtgacggcgtcgtagcgcgcgagcacctcgtccgccgggagcacccggccgaggtacagctcggaatagccgagcttgttcatgcgcgaggcggtggattcctccgccatgagcacgctcgcgtgcacctgttcgcgcgcgcggtcgagctccgactgcgtgacgccgtcggtgcggaagcgctcgagctcgtcgcggatgagcgcgagcgcgcgctgctccgtctcgcggccgacggcggcggagatgccgaacatgccgcagtcgagaaagctcgccgtgtaggtgtagatggcgtagcacagaccgtttttctcgcgcacggtctgaaacaggcgcgaggacatgttcccgccgaggatggacgagagcagcgccatggtgaagcgctcctccgcccccgtcggcaggccgggaaagccgatgctgatctggttttgctcgatggccttgcgcttgagcgtgaaggctggggtgtagctgccggaccgcatggtcagatccggccgcacgggcagccacgaaaagtgcgcggcgaggcgcgcgatgttctcatccgtgaagctgccggacacggcgataacgatgcgcggcgcgatatagtgcgcgatctgaaacgagcgcaggcgcgcacccgtcagccggtcgatcgtggccgggcgtccgagcaccggccgccccagcgcgccggggaaggcggcgccgatgagccgctccgtgaccagatcctccggcgtgtcggcgtacatgtccatctcctcgcggatgacgccgcgttcgttatctgcgtccgtctcggaaaagttcgatgtgaagagcatctcggcgagcagatcgcccgcgcggtcgaggtgctcgtcgagcacgcgcgcatagtagcacgtgccctcgcgcgtggtgtaggcgttcacctggccgccgatggcgtccatgcgttctgccagctcggaggcggagtgctgtgccgtccccttgaagagcatatgctcgataaagtgcgcgctaccggcctcgcacggcgactcataccgtgacccaacgccgacccacacgccgatggccgccgagcgcacgtgcggcatgtgctcgtagacgatgcgcacgccgttcggcagcgtctgtttttcgtacataatgtgctgtccccccgtggaaaagtgggcggggtgtatgcgcaccccgcccacacagttgtgccgaaattacatcaggcccttttcacgcatcgcgtccttgcgggacaggtcgatgcggccgcgatcgtcgacattcatgaccttgacccaggtcatgtcgccgatcttgagcacatcctcgaccttttcggtgcgcttgaactcgagatccttgatcttgacgaggccgtccttgcccggagccagctcgacccatgcgccgaagtcgctgcggatgttggagaccttgccgtagtacagctcgccgacttccggctcgaagacgatgttctcgatggtcttgcgcgcggcgcggcaggcctcgatgtcctcggacgcgatgaagatggagccgtcgtcctcgatgtcgatcttgcagccggtgtcggcgcagatcttctggatgaccttgccgcccgagccgatgacctcgcggatcttgtcggggttgatcttcatctggatcatcttcggggcggaatcggccagctccttgcgcggctcggcgatcgccttgagcatgatctcatcgaggatctggaagcgggcctcgcgtgtcatacggaacgcttccttgacgatctcgtgcttgaggccgtcgttcttgaggtccatctggatggcggtgatgccctgcttcgtgccggcgaccttgaagtccatctcgccgtggaagtcctcaacgccctgaatgtcgatgaaggtggtgaagtcgtcgccgtcctggatcagaccgcaggagatgccggcgaccggcgccttgatgggcacgccggcgtccatgagcgcgagcgtggagccgcagatggagccctgcgacgtggaaccgttggacgagagcacctcggacaccacacggatggcatacgggaactcctcgactggcgggatgacgcactgcagcgccttctcaacgagcgcgccgtggccatactcgcggcggttggtgctgcgggcggcgcgggcgtcgccggtggaatacggcggcatgttgtagtggtgcatgaagcgcttttcttcctcttcccagatggtgtcgagcttctgggacatggacagcgtggcgagcgtggcgatggacagcacctgcgtctggccgcgggtgaacaggccagagccgtgcacgcgcgggatcacaccgacctcggcatcgagcgggcggatctcgttcatcttgcggccgtcgacacgatgaccggcaagcagccacttcttgacgatcttcttctgcatcttgtagaggatctcgtccatgtactgcatcatgtccgggtgctcggcttcatatttttcctgcacggcggcgatccattcattcacgcgcgcctcgcgcacgttcttgtcgtcggtgtccatgcagtactccatgccttccatctcgttggcgcacaggagctcgaacagatcctcgtcaaaggaggcgtgctcatactcaaacttcggcttgccgatctcgctgaccatcttgtcgatgagatcgagcacgggctgcaggtgctcgtgcgcctgcacgatgccctcgtacatcacatcatccggcacctggtcggcctcggactcgatcatgacgatcttcttgtgcgtggccgcgatggtggtggtcatgcggttggtcttgcgctgctcctgcgtgggattgaagaggtacttctcgccgtcccagccgaggacgatgccggcgatggggccgttgaacggcacgtcggagatgctcacggcggcgctcgcgccgatcatggcggtgatctccgggctgcagtcgcggtcgacggacagcacttcacaggcgatgatgacgtcgttgcgcaggtcgctcgggaagagcgggcgcatcgggcggtcgatcaggcggctggcgagcacggcgggcaggctgggcttgccctcgcggcgcatgaagctgccggggatgcggccgacggcgtagagcttttcgttaaaatcaacggacagcgggaagtaatccacgccgtctttcgggcgggcggaggccgtgcaggtgacgagcacggtcgtctcgccgtagctgacgaggacggcggagttgcacagctctgcgagtttgccggtctccatgacgaggggacggccttcatactcgatctcgtagcgcttgtagttggggaactgcttgtgcgtggtgataatcatgggttctggtgctcctttcttttgttggcggaaacgccagagccagcacttgcatccacgtcccatgcgcgatggggcgcagattcaaatactgggcagcggcgctcccgaaaatgggctgccggggcggaaacgaaaaaagcagggggacaatatgaaattatccccctgcgttcaaacgttcatacccttcggaaaagccgaacttacttgcggatgttcagctttgcaatgatcgcacgatagcgctcgatgtccttctttgcgaggtagtcgagcagacggcggcgcttaccgaccatcttgtacatgcccagacggctgtgcttgtcgttcgggtgcaccttcaggtgctcggtgagctggtggatgcgctcggtgaggatggcgatctggacctccggagaaccggtgtcgccctcgtgcgtcttgttggcttcgatgactgcggtcttttcagctttggtgatcatggtgatgacttcctttctttgttttcgtatccgctggcgcagaaccgggcggaaaggcaccgctgcaaagcggcaagccccggatccgggcacatggactgttttacaataccacaccccgcggtacttgtaaagagaaatctttctccatacgccgcgcggcgcaaaattcccgccgccgtctcggcggacagcggcgggaacgggccaaacttatttcgcgcccttgccgtgggcggccttcatgcggcgctcatggtcgaggatgcgcttgcggatgcgcaggctcttgggcgtgacctcgagcagctcgtcgtccgcgaggaactccaggcactgctccaggctcagcttgcgcggcggcacgagacgcagcgcgtcgtcagagccggcggcgcgggtgttggtcagctgctttttcttgcagacgttgacggtgatgtcctcctgcttcggcgacacaccgacgaccatgccggcatacacgggcacgcccgcgccgatgaacagctggccgcgctcctgcgcattgaacaggccgtaggtgatgctctcgccggtctcgaacgaaacgagcgagccggtgttgcggcggctgaggtcacccttatagggggcgtagctgtcaaagacggaggccatgataccctcgcccttcgtatcggtcagaaattcgttgcggtagccgaacaggccgcgcgccggcacgagaaactccagccgcgtgcgcttgccgatgggctccatctgctgcagctcacccttgcgggcgctgagcttttcgatcacggcgccgacggcatcggccgggacgtcggcgacaaggcgctcgatcggctcgcacttctggccgttgatcgtctggtagagcacgcgcgggggcgagacctggaactcatacccctcgcggcgcatggtctcgatgaggatggacagcgacatttcgccgcggccggcgacgttgaacgaatccgtcgcgccctcgagatcgctcacgcgcagggacacgtccttgagcgtctcgcggtagagccgctcgcggatctggcggctggtgacgaacttgccctcgcggccggcaaacgggccgtcgttgacggagaaggtcatctccatcgtgggcgcggagatcttcacgaactcgatcggctcgacgcagctcggcgcgcagatcgtgtcgccgatggtaatgtcgccgatgccggacatggcgatgatgctgccggcctccgcctcagtgacgggcacgcgctgcaggccctcaaactcatacatggacacggccttggccttcttggccggggcgtccggctcgtggtagttgcacacggcgatctcctcgttctgacggatgacgccgcgctcgatgcggccgatggcgatgcggccgacaaactcattgtagtcgatggacgacacgagcatctggaacggcgcgtcgacgttctgctccggcgcggggatatactccagaatggtgtcgaacagcgggcgcaggtccttgcccggcacatccggggagtaggacgcggtaccctgacggcccgagcagaagagcatgggcgagtcgagctgttcgtcggtcgcgttgaggtccatgagcagctcgagcacctcgtcaatgacctcgtggatgcgctggtcggggcggtcgatcttgttgatgacgacgatgacgcggtggccgagctcgagcgccttgctgagcacgaagcgcgtctgcggcatgggaccctcggcggcgtcgacgagcaggatgacgccgttgaccatcttcaggacacgctcgacctcgccgccgaagtcggcgtggcccggggtgtcgacgatgttgatcttcgtgtcgccgtagcgcacggcggtattcttggccaggatcgtgatgccgcgctcgcgctccagatcgttggagtccataacgcggtcgacgacctcctgattttcacggtagacgccgctctgcttgagcatctcgtcgaccagggtggtcttgccgtggtcaacgtgggcgatgatggcgacgtttctcaatttctccattttgcacacttcctcaacgcaaatacatatttcaaatgatttctgttcgcacgaaattgtattttagcacggaaaacctgatattgcaacagtttttcgtgtttacattccccgaacggcatgataaaatgtgttcatatctgtatttttcgtttttgagggggcagaccatggattccaacttctttgcgctcatttcgcgcatgcgctatatcgcgcgctggggcctgatgcgcaacgccctgcccgagaacattcaggagcacagccacatggtggccgtgctggcgcacgcgctcggcgtcatccggcgcgacattttccaccagccgtgcgacgtcaacgcgctcgcaactgcggcgctgtatcacgatgcgtcggagatcctcacgggtgacctgccgacgccgatcaagtatcacaacgcggagatcatgtcggcctaccacgcggtggaggatctggccgtgcagaagctgctcggcatgctgccgccggagctgcgcgagacctatgccgatgtgctcgccgaagataaggacggcgacatttacccgctcgtgaaggcggccgacaagctctcagcctacatcaagtgcatcgaggagcgcaaggccggcaacaacgagtttctctccgccgaggcgcagacgcgcgcggcgctcgaggcatcccccctgccggaggtgcagtattttctggagcatttcatccccgcgttcgagcgcgatctcgacgagctcggcgcgatcggtcaataaggaggacaaaccatgcgtgcaatcgtaaccgtgatcggaaaagaccgtgtcggcatcatcgccgacgtgaccgccctgctggcgcagtacggcgtgaacgtgctggacatcagccagacggtattgcaggaatacttcacgatgatcatgctcgtggacgcagcgcagtgcaccgtgccgtttgcagacctcgcccgcacgctcgacgaggccggcacacagtgcggcctgcagatccgcgcccagcgcgaggacatcttcaacgccatgcaccgcatctgagaggacacgaccatgatcaaccgcagtgaaattttgcagacgatcgccatgatcgaccagcagcacctcgacatccgcaccatcacgatgggcatctccctgctcgactgcgcggacacggacatcgagcgcagctgcacgaaggtatacgacaagatctgccgccttgcgggcgatctcgtgcgcacgggcgaagatatcgaggccgagttcggcatccccatcgtcaataagcgcgtgtccgtcacgcccatctccctcgtcggagcgggcacaggcgcgcagtcctatgtgccgtatgccaaagcgctcgaccgtgccgcgcacgagatcggcatcaacttcctcggcggcttttccgcgctcgtgcacaagggcatgacggaatctgaccgcgtgctcatcgcctccatcccggaggcgctggccgagacggagctggtgtgcgcgagcgtgaacgtcggctcgacgcgcgcgggcatcaacatggacgccgtggccgagatgggccgcaccgtcaagcgcgccgccgcgcttacggccgatcagggcggcatggcctgcgccaagctcgtggtctttgccaacgccgtggaggacaaccccttcatggccggggcgtttcacggcgtgggcgagccggagtgcgaggtgcacgtcggcgtgtccgggccgggcgtggtgcagcacgcgctgcagagcgtgcacggccaaccgttcgacgtcgtggccgagacggtgaaaaagacggccttccgcatcacgcgcatgggccagctcgtggcgcaggaggcgtccgcgcggctgggcgtgccgttcggcatcgtggacctgtcgctcgcgccgacgcccgccgtcggcgacagcgtggccgccgtgctcgaggagatggggctggagtccgtcggcgggcccggcaccacggcggcgctcgcgctgctcaacgatgcggtgaaaaaaggcggcgtcatggcctcgtcccacgtcggcgggctctcgggtgcgttcatccccgtgtcggaggatgccggcatgatcgccgcggccgaggccggccgcctgacgatcgagaagctcgaggccatgacgtgcgtgtgctccgtggggctggacatgatcgccgtgcccggcgacacgccggccgagacgatctccgccatcatcgcggacgaggccgccatcggcatgatcaacaacaagaccaccgccgtgcgcatcatccccgcgcccggcaaacaggtgggcgacacggtggcgttcggcggcctgctcggcagcgcgccggtcatgccggtcaaccgctgcagcgcggccgacttcatcgcccgcggcgggcgcatccccgccccgctgcacagcctgaaaaactgagaggagagcaaagccttgacacaggaaaagatggaccgcatcagcgagctgacgcgcatcgcgcgcgagcgtgacctgacgcccgaggaacaggccgagcgcaaggcgctgcgcgaggaatacatcgccgactggcgccgcagcacaatcgacgtgctcgaaaacacgtacatcgaccacggcgacggccgcatcacgaaactgccgaagaaaaagcgctgagccgtcacgctcttgacaagcgcggcatatcgtgttatacaagaaagaggaattcccctcatgagggggaaaattgaccggaaggagtctgagcaatgcgtctttgcagctgcagcagcatccgggtcgcggcatgtccgacggcctgttgttgtcgtgcgcaaagaagcgtcgctttctgccggtaagtccacggccgcgcccaaaaggtacgtccgtcatgcatccacatggtcatgcaacgcaggaagcgaaacgcttcctgcgcttttttgcctgtggcgctatgtgaaagaagaaggagtgtccccatcatgacgcaaaaaagtctgctgcacgccgtggcggcacagatcgccaacggctacgaaacggccgaagtgcccatgtacagcgagcagctgcgcatgcccgaccgcaaggtcatcatcaagatcatcgagaacctgcagaaggtgttcttcccggcgtatttcgcgggcggcacggtgtcgcacgtctcggccgagacgtttgcggagttcctgctcggcgagatctacaccgacctgcgcgagcaggtgcacctggcgttttccaacacgatcaaggacgagagcgagctgcgcgagcgcacgagcgccgtgtgcgaccgcttcctgtgccgcctgccgcagatccaggccatgctcatgaaggacgtggccgcaaacttcgacggcgaccccgccgccggcagcaaggaggaggtcatcttctcctaccccggcctgtacgcgatcttcgtctaccgcgtggcgcacgagctctacgagagcaaggttccgctcatcccgcgcatcatgagcgagtacgcccacggcgcgaccggcattgacatcaaccccggcgcgcagatcggcgaatatttcttcatcgaccacggcaccggcatcgtcgtcggcgagacgacgatcatcggcgaccacgtcaagctctatcagggcgtgacgctcggcgcgctcagcccgcgccacggccacgccgtgaccggcaagcgccaccccaccgtcggcgacaacgccacgatctactccggcgcgtccatcctcggcggcaagaccgtcatcggcgcaaactccgtcatcggcggcaactcgttcatcaccgagtccatagccccgaacacgaaggccagcactgagaccccgcgcatgatcttccgcgtcgcgcagccgaaacccggcgacgaaaaatgacccacaagcaagaaaacaccgcaggccggttggcctgcggtgttttttaccttatgcagtttcgcgcgctcacaataccccgatgccgatgctcagcaccgcgccgacgagcacgatgccgatgccgacgagacacagcaccacgacgacggcggtgctcatatgccggcgcgaggcgatcgccccgatggtgaggccgagccccatcagcgcggacaccgcgagcacgagccacgcaccgcccttcatttgcagagggcgacggcggtcttcgccgcgacgcgggcgttattgagcacgagctggatgttgctctcgagactgtcgccgccggtgagctccgccacacgggcaagcaggaacggcgtggtctccttgccgtggatgccctgctcatggctctcggcgagcgcctgatcgatggccttgtcgatgacggtcttgtccatggcatactgctgtgggatcgggttcgtgacaagcatgccggtcttgaggcccaggtcgcgctgcgcctggaagatggcagccagatcctccggcgtgtcgacgcgcgcgtcaacaccgagaccgctctcacgggtgtagaatgcgggcagctcgtccgtgccgtagccgagcacgggcacgcccttcgtctccagatactccagcgtcaggccgaggtcgagaatggccttcgcacccgcgcacacgaccatgaccggcgtctgcgccagctcttcgaggtcggcggagatgtccatggtcgtctcggcgccgcggtgcacgccgccgatgccgccggtggcaaagacctggatgcccgccatatgggcgatcatcatcgtcgtggtaacggtggtcgcgccgtccgcaccgcgcgcgcagatgaccggcagatcgcggcgggagaccttggcgaccttgcgcccggccttgccgaggtaggtgatctcctccttggacaggccggccttcaggcggccgccgaggatggcgatggtggcgggcacggcgccgttgtcgcgcagagtctgctcgacgagcagggccgtctcgacgtttttcggatagggcatgccgtgggagatgatcgtgctctcgagcgcgacgaccgggcggccgtccgcgagcgcctgctgcacctcgggtgcgatgtccagatatttgttcatgttcataatcaaaaacctccttggttgtgtcggtccgcttggttcgcctatattgtaaaaggttttccgaaattgtcaagcacaatccatccgcagccgttccgcccgcgatcaaaaggaggctgccgaagcagcctcccaaaaatgcatatacaaaaaatcacgcagccagaagcgacgaagccggctccggatcttccccggaattcatgacttcatccatgccgatgttgtagaggttgaagaacacctgcgcaagctgcgcgcgcgtgagcatgccggtcgggtcaaagtgcgcgccgcccacgccgttcatgatgccgcccaggtagcagaacgccacgcccgctctcgcccaggaagcgacgctgccgccgtccgcgatctcagccagagccgcatcgaccagatccgcgccgagcttcacatcggccatgcgcaagaggatggtcgccatctcctgacggctgacggcccgcgccggacggtacgtgccgtcctcatagcccttcaggatgccggtgctgctggcccagagcatggcatcgtaataccacgcacccggagcaacgtccgcaaatgcgcccgttctctccacggtcggcgaaccggcgagccggtagagcacctgcgcgaccatggcgcgggtcgtcgtcacgttcggcgcaaactcggtcgcggtcatgccgttcatcaggccggaagcctgtgcgaaatcgacagccgccttgtaccagccgctctgcgcatcggtgaaggtgttgggcacaaagaccagcttcggcatggccttgagcaggtcggccgtggccgcctcgaccgcttccgtcgtcttcgccgccttgtaggccgcataggccgccttcacgccctggacggagtcttccgtgtacgccgtcaggtcacacagcaggctcatattctccaggaacgtcccgcgggcctccagctcttcagcggacgccgctctcacgatgcggtcgcccggcagggcatattcctcgccgatgacaccgccaagcacctctgtaatgtattccatgaccacctcgtccagcggcaggccggtgtcgaactggtcggtcgccgccgcgaaggcgtagtaggtgtcgccgccaccggccacgaagttgttcgtgacgacagcgtaggtagccgtcgggtcaaacgccttgccgttgacgttgtcaatggtcacgcgctggatgctcttcgggccgtagtaggtggatttgggatagggatccggattcgcgtcatacttctcataggtcttgaccatgaaggtcacgcccgccgcctgcgggaagccgccgagggattccggcgtgcagaaagtactggcctcgagcgcctcgagcaactcggcgccggtcacgtaaacaactgccagcgtgttgccgaacggcagcacggtgttgatgtccttcttggtgatgtcgcccgccttgacggtcgcgcggatgccgccgccgttcgtgatggcgaccacgttctccaccgggaccttgatcgtggcgtcgctgcggatcttccagagcatggcgtccgtgatcaggtcgccgaggttggtctcagagtcacggttgccgttgggggccttcgcgccgttgagcgtgaccttgctgacggcaaacttctcgccataggccttgtcgatggggtcgatgatggccttggcggccgcggcgaccttctcatcgcgcgttttgtagtcaacgacggtgacgtccttgccttcgaccttctccttgtgccagatgcccttgagctcgttgccgacgatcttcttcgtggcgttgtcaatggtgatgacgccgatgttggcaaaagccgtgcccgtggactggatggcctcgccgttcgggccggcggtgatcacgctgtgggagtggccgtcgatgatgaagtcgatgccctccacattcgcggccagatcataggaggtatagggctcggagctctcgtccacgcccaggtgcgcgaggcagacgacgaggtctgcgccctgctccttgagggctttgacctgcgcatccgcgcaggcatagagctctttgccgtccttgcccgcgaggaacttcaggccctcgatcagcttcgggttggccttggtctgcgcttcgggcgtctcgagaccgaagaagccgatcttcacgccgcccttttcgatgatggtgttggcatcgaaaatggtcttgccgtcggcgccgagcacgtcggcgcacaggaccttgaacttggcagccttcatgttctccgccagctgggcatagccgtagtcgaactcatggttgccgatggtggccacatcgtagccggtggcgttcatcatcgtcaccgcgtccgcgcccttatggacgctgacgtagacggtgccctgactgtagtcgccggcgtcggccaggatgacctcggcgccctgcgcctcatagtctgccttcagggatgccatggccgcatacaggtcgatcgcaccgtgcacgtcgttcgagtgcaggatgacggtcttgccggtgagcggctttgcctcgtcagctgcaaatgccgtgcacgacagactcaggatcaggcacagcaccagcagcagcgaaagcagtttcttcgtgtgcttcatgtgatatcctccattttttgaatttggggtatcgctgttttgattatagcatcccatgagaaaaattgggatgggctttgcgcaaaaagtgcggcaaatccggcgcgcaatttgaacaaaattattcgtcatttttgccacatttgtcaaataaccgaagcagacaccgttttcttctttttcccatttacaacgcttcagataatatgataaactattgtttcaaagtgttatttgaaaggagccgaacgatgagctacgcagacgaggtctttatccgcaactgccgcgacattctgacgcacggcgtctgggacaccgatcaggcggtgcgcccccactgggaggacgacggcgcgccggcgcacacggtcaaaaagttcggcatcgtcaaccgctatgacctgtccaaagaatttccgctgctgacgttgcggcggacctactggaagaccgccgtggacgagctgctgtggatctggcagcagaagtcgaacaacatccacgacctgcgcggccacatctgggatcagtgggccgacgagaccggctcgatcggcaaggcctacggctaccagctcggcgtcaagcaccagtatcccgagggtgaattcgaccaggtggaccgcgtgctctacgacctgaagcacaaccctgcctcccgccgcatcctgacgaatatttatacgttcgaggatctgcacgagatggcgctctatccgtgcgcgtactcgatgacgttcaacgtctcgggcaacacgctcaacgccatcctcaaccagcgcagccaggacatgctcgcggcgaacaactggaacgtcgtgcagtacgccgtgctcgtgcacatgttcgcgcaggtgtccggtctgcgggcgggcgagctggtgcacgtcattgccgacgcgcacatctacgaccgccacgtgccggtcatcgagcaactgatccagaacgagccgaaaccggcaccgcagtttttcatcgacccggacgtgcacgatttttacgccttcacccgcgacagcttccgcgtcgaggggtacgaatacagcgagttcacggggaagatccccatcgcggtgtaagggggactgagccatggatgcgatcgtcgccgtctatgccgactggggcatcggggccaagggcacgcagccgctcgtgatcccggccgaccgccgccgcttccgcgagctgacgatgggcgcggccgtgatcgtcggccggcgcacactggacgattttccgggcggcaggccgctgccggggcgcgaaaacctcgtgctcacacggcagaacatcgtgatcgagggcgcgcaggtggtgcactccccggcggaggccgcggccgccgccgcgcagtatgaccgctgcttcgtcatcggtggagacagcgtgtttcggcagatgtttccccacctggcgcgcgtatacgtcacgaaaatcgacgccgcgccccactcggacgtgttttttccggatctggacgccgaccccgcgtggcgctgcgtatccgccgagccgcgcgcggagcacgacggcgtgggctatcagttttgcgtgtacgaaaaagcagaagcataaaaagcctcgcagagtttgccgcccgcaggcggcaaaaaagtgcaatcattttctcgcgcgacatgtgcgtgagagaaaatacttctcagactgcaagtgtggaatttgtgcgccacaggcacacaaattctgcgcacagcagactgtaagccttttgtcgggaaaacctccggttttcccgacaaactcaaaaccgccgctttcctcttcggaaagcggcggttttttctgccttcacccggtgagcaccgtgagtgagagcgcgttgatgcacatgtggaaaaacaccggcggccagatcgagcgcgtctgctcatagcagaacgtgagcgcggccgacaccggcacatacgccagcgccgagagcagcagcttcggatcctgatacacgagcacatactgccagacatggtagagcgagaagagcgcgatcgacgcggcataggcccaaaagcggctcttcggccggatcgtgccgaagaccacgccgcgaaacaggcactcctccacgagcggtgccatgagcaccgcgacggcgatcatgcgcttgtagtccgtccgggcgaggccggtcacggcatcgttgttcggcacgggcagctcgccgatgaggctcgtgccgagctgcagcacgagcgagagcagcacgtcgatgccgtaggcggcaaacatcatgccgaggcagcgcaggatgctgccgaccatcgtgtcaaagctgcggcgcagaaaccgccacatggcgatgagcgtgaacacaaggccgcagaggtaatacagaacgttgcacgtcacgtccgacggctgctcgccgagcaccgccaggagcagcatgccgagcgtcagcggcagcacgaccgcatggatggggaaatacacccagcccgcgatgcgcgcgccgcgcggcatggggtctgtccacgccgtgttgggatgttccacgtcagcccctcgctttctgctgcagctcaaagagcaggcgcatggcctcgagtggcgtgatcgtgttgaggtcgatgctgcgcagctgctcggcgatttcatctccggccgcgtcgccgagcgtcatctgcgccgcatcctgcaccgcgtgggcgggcgcggccagctccgtcgcgccggactccagctcgcgcaggtaggtcttggccttcgtaatgatcgcgtcgggcacgccggcgagcttggcgacctcgatgccgtagctgtcgtcggccgcgccggcgacgatcttgcgcaggaacagcagcgtgccgccctgctttttggccgtgatgttgtagttgcgcacgccgggcagcgtctgctcgagcgcggtcagctcgtggtagtgcgtggcgaacatggtcttggcgccgaggcggcgggggtctgcgcagtattcaagcaccgcgcgggcgatggccatgccgtcgtaggtggacgtgccgcggccaatctcatcaaggatgagcaggctctgcgccgtggcgtggcggaggatgttggccatctcgctcatctcgaccatgaacgtgctctgcccggcggccaggtcgtcggacgcaccgatgcgcgtgaacacgcggtcgaccacgccgatgacggcgctcttggccgggacgaacgagcccatctgcgccatgagcacgatgagcgcagtctggcgcatatacgtggatttaccggccatgttcggcccggtcacgatggcaacgcggtcgtccgcgtcgttgagaaacgtgtcgttcgggacaaagagactgtccttctgcgcctgctcgacaacggggtgacgcccctcgcggatatcgagcgtgcgcgagagatcgacctcggggcagacgtagtggtttttcaccgccgtctccgccagcgagcacagcgcgtcgagccgggcaacggcgtccgccgccgcctgcacgcgcgcgacctcgcccgcgacgagctggcgcacctcgttgaagagcgtgtactccagctccgcgatgcgctcgcgcgccgtcaggagcgtgttctcgaggtccttgagttcgcgcgtgaaatagcgctcgctcgacaccagcgtctgcttgcggatatagtcgtccggcagctcggtgacgcccgcgctgttcggaatgtcgatgtagtagccaaaaaccttgttgtagccgaccttgagctttttcgcgccggtgcgctcgcgctcgcgctgctcgagctcggcgacggtctgcgcgccgtggtcgcgcacgttgcgcaggcggtcgacctcctcgctgtagcctgggcggaggatgccgccctcgcgcacggaaaacggcggttcgtcgcagatggcgcggtcgatgcgcgcgcagagatcggcgagcgtgtccatctgcgcaatatcgcgcagggccgcactgtgcacatccttcagcagcgctgtcaggttcggcagctgcgcgcagcacagggccagcgcgtgcaggtcgcgcccgttggcagagccgtacaccgcgcgggagacaagacgctgcatgtcgccgatctcgcgcaggcagcggatgagctcgccccgcaggacgttgtcgcccaccagctcctccaccgcgccgaggcggcggcggatctgcacggggctgagcagcgggcgctccacccacgcgcgcagcaggcggccgcccatgggcgttttcgtcttgtcgagcacccagaggaggctgccgcgcttttcgccggagcggaggttttccgtcagctccaggttgcggcgcgtggtgtagtccagctccatgtagtggtcgtcacccagcagctccagccgccggatgtggccgaggtcgcacttttgcgtctcgtgcaggtaggccagcagcgccccggccgcgcacacggccgccggcgcctcgccgaggccgagcgcgtccgtgctctgcacgccgaactgctcgcacacgcgcgcggccgccgccatgtattcaaaccggtcgccgcccgcctcgaccagactgccgaggcgcttggtgaggaaggtgcggatgtcgtcattttccgccgccgcgtcggcgcacacggcctcgcgcggagcgaagcggccgagctcgttgaggatgtgactcacggcgtcggccgggtagttcgcggcgcagaattcccccgtcgagaggtcgcagaacgccgtgccgccggactgcccgctgagatacaccgcgcagaggtaattcgacttattctcctcgagcatggacgaggccgtgactgtgccgggcgtgatgatgcggatcacgtcgcggtcgaccagccccttggccagcgcggggtcttccagctgctcgcagatggccaccttgtagcccttggcaatcaggcggccgatgtacgcctcggccgagtggtacggcacgccgcacatgggcgtgcgctcggccgggtcctcgacattgcggtcgcgcgtcgtgagcgtgaggtcgagctcgcgcgcggccaggcgcgcgtcgtcgtcgaacatctcatagaaatcacccagccggaaaaacagcaggcagtcggggttgcgctgcttgatctcataatattgccgcttcatcggcgtcagttccgccatgcgtcatacctcctcgccatagagcgcccaggtgttgcttccggtgatcttcacgtccacgaaccggccgacaagggatgcgtccccgcgcatatgcacgaggcggccgcccttcgtgcgcgccgtgagcggatggtcgccccggccgtcggccccgtcgacgagcacgcgctgcacgctgccctcataggcgcggtgcttttcctccgagatgcggttggccgccgcgacgagcgcgtcaaagcgcacctgcttctgcgcgcgggtgtaggggtcgggcatcttcgccgccggcgtgccgacgcgcggcgagtagatgaaggtgaacatcgcgtcgtagcgcacagtctcgatgagcgagagcgtgtcgtcaaattcggcgtccgtctcgccggggaaacccacgatgatgtccgtcgtgagcacaagatcgggcatgtactgccgcgcgagcgccacctgcgccagatatttctcgcgcgtgtagccgcggttcatcgcgtgcaggacacggtcgttgccgctctgcacgggcaagtgcatctggtgcgcgcacttttcgcactcggccatggcgcgaaagagcttttccgtcgcgtccttcgggtggctgctcatgaagcggatgacaaagtcgcccgggatggcgttgagccgccggatgaggtcggcaaagtccacgtcctcgtcgaggtcgcggccgtaggagtcgacgttctgccccaggagcgtgatgtccttatatcccgccgcgacgagctcgcgcgcctcgcgctcgatctcgtccggatggcgggagcgctcgcgcccgcgcacatacggcacgatgcagtaggtgcagaagttgttgcacccgtacatgatcgacagccatgccttgacgctgccgtcgcgctgctgggggatgccctcggccacgctgccgtccgccggcgcgatggcgaacacccgccggtgctcggtgcagacggtgcgcagcagctccgggaagcgccacagctcatgcgggccgaagacgaggtcgacgatgcggtaggactttttcagcttctcggccacatgcgcctgctgcgccatgcagccgcagaccgcgatgatctggttggggttgcgcgccttggtatgcgtcagcgcgccgacgttgccgaacacgcgcgtctcggcgtgctcgcgcacggcgcaggtgttcatgacgacgacgtcggccgcgaattcgtcctgtgtgaaatcaaagcccatggcgcgcagataaccgcgcagcttttcgctgtcggcctcgttctgctggcagccgtaggtatcgaccatggccagcggctggcggccgccggcggtaaagtgcgcgcgcagctgcgcgcagatatccaactggtgctggatgtccgattcggggatctccgttctctgatagctcatgcgatgctcctgcctgtccggcctggccggataaaatttgaagtgtgatagaatattgtagcatttcgcggtggaattttcaatgacaatcctttataatatacgcgcggggcgcacgcgccccatggactgtacttaaaggagggcaaacgatgcccgatattcaaattctctctccgcatctggcggatctgatcgccgcgggcgaggtcgtggagcggcccgcctcggtggtcaaggagctggtggaaaacgcatttgacgccggggcccgcaccgtgacggtggagctgcgcggcggcggcgcgacgtatctgcgcgtgacggacgacggctgcggcatggcgcccgaggacgcaggcatcgcgtttttgcgccacgcgacgagcaagctgcacgacgagcaggggctcgaggccatcggcacgatgggctttcgcggtgaggcgctggccgcgatcagcgccgtgtcgcacatcacgctcacgacgcggcagcgcggcgcggcatccggcacgcacatgacgctcgacgcgggcgacattcaggacatgtacgagaccggctgccccgagggcacgacgatgatcgtgcgcgacctgtttttcaacacgcccgcgcggcgcaaattcctgaagtccgaccgcgcggaaggcgcggcctgcgccgccgccgcgctgcggtgcgcgctcggccggccggatgtgtccgtgcgctgcatccgcgacggggaggaggtcttcttctcccccggtgacaacaagctcgacagctgcgtctacagtctgctcgggcgcgacctcgccatgagcctgctgccctgcgagggcgaggccgacggcgcgcgcgtgcacggcttcatctcctcgcccgccgccgggcgcggcagccgcgcgcagcagtacttcttctgcaacggccggtggatccgctccgccgcactgcaggccgcgctcgaacaggcctaccgcaacacgctgctcgtgggccgcttccccgcgtgcgtgctgtatgtggagctcagctgtgcggccgtggacgtgaacgtccacccggccaagaccgaggtaaagttcacgcacgagcgcgcggtgtttgacgctgtgtattacggcgcgcgcgccgcgctcgaagcggaaaaagcgcctgtgaccacgctggcgaaggcggctgccagaccggcgcccgcgccgaaggcagacccgttcgtgccggctgcgccgaaagcagccccggccgcgcccgcagcgccggcatttgcgcccgcgcgcacctatgcccccgccgccccggcggaggagacggccgcgctccgctcgccgacggcgtcggccttcgccgcgccgcgcgtgaccccgccgccggtgttttccgcgcccgcgtgccccatgccggccacaccggccgcacccgagccggctatgccggccgcgcagatcgtgcagaccgccatcgagccggaggcggaaacgccctccccgctcgagagcgccgcgcccccggccgagccgcccgcccgcctgatcggcgaggcgatgcacacgtacatcctcgtcgaaaagggcgagacgctcatcctcattgacaagcacgcggcgcacgagcgcatcaactttgaccgcctgcggcagagccctgccgacatcccgtcgcagacgctgctcgagccgctgcccttcacgccggacgcgagcgatgccgacgtgctgcagcagtacggcaacgtgctcgcggagctcggcttcacgctcgagccgttcggccgcaatgattacattctgcgcggcgtgcccgcgcagctcgacgcggcggacgcactgcccgcgctcgaggagatctgcgcgcagctgcgccacggcgcgcacatggacgcgcaatccgtgcgcgacgaggtgctcaagaccgtggcgtgcaaggctgccatcaaggccggctggcagaccgaacccgaggagctgctgcgtctggcggacgcggtgtgcgcgggcgaggtgaaatactgcccgcacggccgccccgtcgccgtgacgctcacgcgccgggagctggacaagctcttcaagcgcattgtttaaaaaagaagcagggagcgccggaacgcgctccctgtcagcctgcacagcttcgtttacttgtgatagtacaaaatgcccatgcagccgggtccgcagtggttcgacaccgtgcagccggcccgcgtgtggatgacctcctcgaacggctggcacgcgcgcacgacacgctcgagctcccgccacgtggcctcgtcacagccggagtccgtgatgaagatgcgatggcagtcgatgtcgtcgcggcccttgagccgctcctcgatgtactgcacgtagcacttttcgagcttgccgcggtacttgtggccgacgcccatcttgccgtccttgacctcgatgcacggcttgaggtgcaggaggttggcgctcatggccacgagcgccgagcagcggccgccgcgcttgagatactccagcgtgtcgatcacgaagctgacatcgagcttctcgcgctttttctccagcgccgatgcgatgtcggccgcgtccatgccctgttcggccatctcggccgcgtcgagcaccaggtggccgatgccggtcgagaggttgcgcgagtccacggggtagacgttcgtaaactcctgcgccgcgatgcaggcgttctggtagcaggcggacatgtcgctcgagatcgtgaagtggatcacggcgtcatattcctcccggcacgcggcgaagtacgccagatagtccgacacgttcaccgccgcggtcttgcagagcttgcccgtgacatttgcgtactcgtagagctcctcgggacgcacgtcgatgccgtcgcgcagggtctcctcgccgcggatgatgtacagcggcgtgatgccgatgtggtagcgctcgatcagctccggcgaaagatcgcacgtgctgtcggcagaaattttgatcttcatgggttcaccttcttgaaaactgggaaatgtgctttcattctaacacatttctaatacttttcaacataatctttttgaattctccctcacggaaaggagactgccacgatgcagccaaaaattgtcgtcatcaccggcccgaccgcctcgggcaagaccgcgctcggcgtggcgctcgcgcagcgcctgggcggcgaggtcgtctcggccgactcgatgcagatctaccgcggcatggacatcggcacggccaagccaacgccggaagagatgcagggcgtgccgcaccatatgatcgacatcgccgatcccgcggaaaattactccgtctcgcgctatgcggcgcaggcggccgcctgcgtggacgatattctcgcgcggggaaaactgccgatcgtcgtcggcggtacggggctgtacatcgactcgctcatcgccgggcgcacgttcgccgacggcacggccgacaccgcgctgcggcaggagctgagcgagcgctatgacgaaatcggcggcgagggcctgctcggcgagctgcgcaaggtcgaccccgagcgggcggccaggctccaccccgcggacaagaagcgcatcgtgcgcgccatggaggtctacatcctcacgggcaagaccatcacgcagcacgacgccgagacccgcgccgtgccgccgcggtacgacgcggcaaagatcgcgctcgatttcgccgaccggcaggatctctacgaccgcatcgaccggcgcgtggacgccatggtgcgccagggcctgtttgacgaggtgcgcgcgctgctggccgccggtgtcccggccgactgcacggccatgcaggccatcggctacaaggaggccgttgccgccgtgcggggcgaggcatcgccgcaggacgccgtcgccgccatccagctcgcctcccggcgctatgccaagcgccagctcacgtggctgcggcgcgatccggacctgttctggatccggcacgaaaaaacgccggacatggaccgggcgtgccgcctttcgacgcaattcttatccggccgcggtatagaatagtggcctgtacaaatccggaggaaactgccatttcgaccggatttgtataaattcactatttcacggagcggcagattgtgctatgataaataaatgtgtatccgctccggccaaaggagcggcgatcatgcaaaagacacagaaccttcaggacgcattcctcaactacatccggcgggaaaagatccccgtgaccctgtttctcatgaacgggtttcaactgcgcggcgttgtacgcagctttgacagcttcgtcgtgctcatcgacgccgacggccggcagcagatgatctacaagcacgcgatctcgacggtcgccccggcgcggccggtctcgctcgagctgcagggctgatctccccgccgccccccgccgaaaggagggccggatttgaagaaaacgaataccttcacgaacatcgccatgttcgtgctcttcgtggccatgctcgtgtatctgggcgtgtacctgtttcgctcgacgcagcaatcctacgccaccgccccggcggtgctcgtgaccgtcagcgagagcggacaggccagcggcatcgtcgtgcgcgaggagcaggtcatcgcctcggacaaggaatttctgtccctgtccgtggacgacggcaaggaggtcgcaagcggcggtgagatcgccatcggcgtggactccaaggccgcgctcgacagcgccagccgcgcccgcgagctaaaaaaagagatcgcctacgtctcgagcctgctctcgcgcgcgggcagcgcctccggcgcgtccgaccgcgacagcgacgtgcgcagcgccatcctgcagctcaacgccgccgtctccgccggcagcacctcggagctggatgacctctgcatggatctcagctccctgctctttggctctgcgaccggcaccgtctcgcagggcgacctcgatgcgctcaatgccgagctgcaccagctcgaaaacgccggcgcaggccgcggcagcatcacggccccggccgcgggcctgttcacgtccacgaccgacggatacgaatcgctcacgccggacatgctcgaaaacctcacgcccgacggcgtggacgcgctcgagcgcacgacccctgccacacccgccaacgcgatcggcaagctcgtcacggcgaaaaagtggtacttcgcctccgtcatgaacaaggccgacgccgaccgcctgaacctgaacggcagcgccacgctcgactttccgcagcattacaccggcaccgtctcggcaaccgtgatgagcaagagcgagccggacgacagcggcaaggtcgccgtcgtgttcgcgtgcaacgcggcgctttccgacacgctggccatgcgcaagacgacggccgacgtcgtctacagcgagcacaccggcctgcgcgtcccgctcaaggccgtgcatatggacgatgacgggcaggcgttcgtctacgtcgtcacggcggcgcagctggagaaaaaaccgatcgagatcatctatcagaccgacgactactgtctcgtcgcccagagcacggagagcaacgccctgcgcgccggcaacgagatcgtcgtcaccggcaagggcctgtccaacgggcaggtcgtgaaataaggaggcgccacccactatgagcaccattgccgaaaacattgccgccatccgcgcgcgcatcgacaccgccgcccgcactacgggccgcacgggcgccgacatcacgctcgtggccgcaacgaagatgaacgacgccgcgcgcgtgcgcgaggccgtcgccgccgggatcgacgcctgcggcgagaaccgcgtgcaggaaatgaccgaaaagctcgcccagggcgcctacaccggcgcgccgctgcacttcatcggccacttgcaaacgaacaaggtccggcaggtcgtgggaaaggtcgatctcatccagtcggtggattcgccggagcttctggccatgatcgaaaagcgcgcggccgggcagggcatcgtgcaggacatcctgctggaagtgaacatcggcggcgaggccgccaagagcggcgtggcccccgccgccctgccggaattgctggaaacggccgccggctgcgcgcatattcgcgtccgcggcctgatggcgatcccgcccgtggcagaaacttccgacggaaatcatgcatattttgcgaaaatgcatgagctttttgttgacatcggcagaaaaaaatacgataatgtttttatggactttctgtccatgggtatgagcggagactttgaagacgccatttccgccggtgcgaacatggtgcgcgtcggctcgtcgatttttggcgcgcgggattattcccggcactgagcgccgtctcggcacactccgcagagatcagtgcagcggcacggcagccgccggcacgtaaaggggggtcccgaatgggatttttggatgaactgaaaaaaatgacccgtccgtatgatgacgacgacgagtttttcgatgatgaggatgaagcaattccggtcgcggaagagcccgcgccggcacgcccggcacaggcccgtccggcgcaggcgcgtccggctgcggcccgccgcccggcgcccgcaccgaaaaggagcgccttcgtgcacgacgagccgtcggaatcggagcgccccgcgccgagctatgcgccgagaggcgacagccgcgcggccgacaaggtcgtcaatctcaacaacggcggcggccagctcaaggtcgtggtcgctgcgccgaagcagtttgaggccgcgtccgagatcgcggagcatctgcgcgatcgccgcgccgtgctcctcaacctggaaaagaccgatccggcggtcgcccgccggctgatcgactttctgtccggcgtcgcctacgcgcaggacggcaagatccgccgcgtggccagcgcgacgtatatcatcacgccattcaatgtcgacctcatgggcgaccagctcgacgatatggagtcgggcgagtttcacctgtaaatccgggcatactgtctctgacagcgcctatcgtgtagtacacctatagaaagaatggaggattatccaacatgactcctcaggatattcgggaaaaaacgtttgaaaaagcgatgttcggcggatacgacatggccgccgtgcagaactatcaggaagaagtggccaccgagcttgccaacgcgcagaaggaagttgccgtgctcaagggcaagatgaaggtgctggtcgataagatagaagagtaccgcgccagcgaagacgccatgcgtctggccatactgtcggcccagaaggtcggcaagcagatagaggacgatgcccaggcccgcgccgacaagatactcggcgaggccaagaacacgtccgaccgaatacttggcggcctccagcacgaaaccgccaacgaggaagccaaactcctcaacgccaaaacgtcctgcgcaaaatttctggaagatgtgcgtaatctgtgcatgaatcagctcgagtacctggataagctctccgggtcgaaaaccgcggctgcgcagcctgctgcgcagccggcgagcgtgagcgcagccccggccgagccggtgtccgcgccggtcgagcagcccgcgcagccggaagccccggccgtcgagcagcctgcgcaagcagcccacgtgtccgccgcccctgtggaggcgcagccggtggagaccgacgacaccgcggccgacagtgcagcagatgacgccacgcagctttatcacttcctgcataacagctgagtgaacatgcaatcaaccagggcgggacggccggtgccgtaccgccctgcacaatttttgatggaaatacaactctgagaggagaaagatagaaccatgtccaagaacgatttcaacgccacgatcaatctgccgaaaacagacttccccatgcgtgccggccttgccaagcgggagcccgagatgctccagcactggtacgacatggacctgtaccacgaaatgctcaaaaagaacgacggcaagccgcgcttcagcctgcacgacggccctccgttctccaacggtgacatccacatgggtcacgcgctcaacaaggcgctcaaggacttcatcatccgctcctacgccatgcgcggctactacacgccctacatccccggctgggacaaccacggcatgcccatcgagagcgccatcatcaaggagcagaagctcaaccacaaggccatgagcatcgccgatttccgcagcgcgtgccacgactatgcgcagaaatacatcgaccgccagatggccggcttcaagcgcatgggcgtcatgggcgactgggagcacccctacaagaccatgaacaagggctttgagtccgacgaggtgcgcgtgttcggcaagatgtatcaaaacggccacatctacaagggcctcaagcccgtgtactggtgcgcccacgacgagaccgccctcgccgaggcggagatcgagtatcaggacgatccgtgcacgaccgtgttcgtgaagttcccgatgcacgacgatctcggcaagctgccgaacgttgaccacagcaagctcttcttcgtcatctggacgacgacgatctggacgctgcccggcaacctcgccatcgcgctcaacccgcgcgagctgtataacctcgtgcaggccccgaacggcgaggtgtatatcatggccgacgccctgaccgagaaggtcatgcacatcggcggcttcgacagctatgaggtgctcgagcagcatccgggcgacttcttcgagaatatgctcgccgaccatccgttcctgcccaagacctcacgcctggtgctggcggattacgtcaccatggattccggcacgggctgcgtgcacaccgcgcccggcttcggcgcggacgactacctgacctgcaagcgctacggcatggacatggtcgtgcccgtggacgatcagggccgccacaccgactacgccggcaagtacgccggcatgaccacggaggaatccaaccccgtcatcctcgcggacatgaaggaagccggctctctgttcgcatccgaggacatcgtgcacagctatccgcactgctggcgctgcaagcagccgatcatcttccgcgccacgccgcagtggttctgctccgtcgattcgttcaaggaggaggccgtcgccgcgtgcgagaacgtgcgctggcttcccgcctggggcaaagagcgcatggccgccatgatccgcgagcgcgccgactggtgcatctcccgccagcgccgctggggcctgccgatcccggtgttctactgcgacgactgccacaagcccgtgtgcaatgaagagagcatcgacgccgtggccaagctctttgaaaaggaaggcagcaacgcctggttcgaccgcccggcggccgacatcctgcccgaaggcttcacctgcccgcactgcggcggcaagcacttcacgcaggagaccgacacgctcgacggctggttcgactccggctctacccacgttgccgccatgcagcgcgaccagggcttctggccggcggatatgtatatcgagggcggcgaccagtaccgcggttggttccagtcgtctctgctcgtggccgtcggcgcgctcggcaagggcgctccgtaccgcgagtgcctgacccacggctggacggtcgacggtgagggcaaggcaatgcacaagtccctcggcaacggcatggatccggccgagatcatcaacgagttcggcgccgacatgctgcgactgtgggcgggcagcgccgactaccacgccgacatgcgctgctccaaggagatcttcaagcagttgacgcaaaactacctcaagttccgcaacaccgcgcgctactgcctcggcaaccttgacgggtttgacgccgagcatctcgtcgcgccggaggatatgcttccgctcgaccgctgggccatcacgaagctcaacgacctcatccgccgcgtggccaaggcgtatgacaactatgaattccatgtggtctcgcacgcgatcaacgacttctgcgtcgtggagctctcgagcttctacctcgacatcatcaaggaccgcctctactgcgaggagcgcaacggcctcaagcgccgcagcgcacagacggcgctgttcctcatcctcgacagcatgacaaagatgttcgcgccgatcctcgccttcacctgcgacgagatctggctggccatgccgcaccgcgccgaggacgacgcgcgcaacgtgctgctcaacgtcatgaatcagccgttcgacgcctatgcgctcagcgaagacgagctcgccaagtgggatcagctgatccgcgtccgcacggacgtcaacggcgtgctcgaggccgcccgcgccgaaaagcgcatcggcaagccgctcgaggctgccgtgacgctgcgcgccgacgacgatgccgccagagccgcgctcgacgacgtgcagagcatgaacctgcccgagctgctcatcgtgtcgcagtgcctcgtcggcggcgacgtgccggaggatgccgtcaccggcaccggcacgaacttccccggcctgcacatctccgtgcgcaatgcgcccggcaccaagtgcccgcgctgctggatgcactccgagcaggccgaccccgagaccggtctgtgcccgcgctgcgccgccgtcgtcgccgcgcagaaggcggagtaaaatcccgatcccaaaatcctgatccgaaagcgaggaaccgctatgtggtatgccatcgtagccatcctgatcctcatcgctgaccaaggcctgaagtactgggtcacgctcaatatcccgctcgacaccgggcacgtcacgctcatccccggcgtgctggagctgacgaatatccacaacaacggcgctgccttcagcatcctgcagcacgcgccgcactggatcttcgtcatcttcacggtcgtgttcgccgccatcgcggtgttctgcctgcggcgcaatgtcgtgcacggcaaggtcggccgctggtcggtcgtgctcgtgctcgccggcgcggtcggcaactgcatcgaccgcatcctcagcggctacgtggtagacatgttcaacttcctgttcatgcgcttcgccgtgttcaacctggcggatatcttcatcgtcgtcgccggcatcacgctgtgcctgcacgtcatcttctaccggggcgacggcagcgaggaaggcgagcccgcgccgaagaaggcgcgcaagtcccgtcagcacccgggcgcccctgcgcgtgcgcacaagctgcatctgcccgcacggaaacagcagcccgctgcgccgaaaaagcccgccgcgcagcccgtgtcccccgtcccggcgaaggacgacccgttcgcggcgtgggatcgcgcgcccgtgcaggcgcagccggtgacaccggcagcgccgtccgcgccgaaaaaggccccggcagcgcctgccgcccccaaaccggtgcaggaaacgcccaaggcggctgcccccgccgtcaaaccggcggacacagccccggacgaccccctgctcgcctatctcaacagcacgcccgccgcgccggccgaaccggaagtcgcggacagcgacaaggaaaaagacaccgccccggcggacggcgagcactattcgctcgacgacattttagcggagttttcggatttctaatggaacaacgaacgattcaaacacaggagagcgccgagcggatcgacgctctccttgcgcgctctctgcccgagctcacgcgcagcgccgcccagcggctgctcgcgcagggcgcggtgacgaaagacggcgcacccgtgaagaaaaactataagaccgcgccaggcgacacgtttgtcgtcacgctgccggacgccgctccctcggagctggtagcgcaggacctgccgctggacgtggtgtatgaggacgacgacctcatcgtcgtcaacaagccgcgcggcatggtcgtgcaccccgcgcccggccacgaggacggcacgctcgtcaacgccctgctcgcccactgcggcgacagtctctccggcgtcggcggagagcggcggcccggcatcgtgcaccgcatcgacaaggacacgtccggtctgctcgtcgcggcgaaaaacgactttgcgcacctcgccctctcggcacagctggccgaccacaccatggcccgcacgtatgaggccgtcgtctgcggcaatctgcgcgaggacgccggcacggtcgatgcgcccatcggccgccacccgacggatcgcaagcgcatggccgtgacgcaaaaaaacgcccgccgcgccgtcacgcactggtcggtcatcgcacgctacaacggctacacgcacatccgctgcgagcttgagaccggccgcacgcaccagatccgcgtgcacatggcgcacatcggtcaccctctgctcggcgacctggtctacggccacaagcggccggaaaagggcctgagcggccagtgcctgcacgcgcgggcgctgcgctttctccacccgcgcaccggtgaactcgtgacgttcacctgccccctgccggactattttcaggacgtgctggcgcgcctcggcccgccggtcggctaatcagaaaggagcattcccatgcgcagatccgatcgagagatcaccgattttcaggagctcatcaccgtcatgcgcgggtgtgacgtctgccgcctcgccctgcacgacgagccgtatccctacatcctgccgctgaacttcggcctggaggtagacggcgagactgtccgcctgtacttccacggcgcaaacacgggcacgaagtacgacctcattgccaaaaatccgaatgtcgcgttcgagatggaccgcgggcacgcgctcatcctcgacgatgagcacggcaactgcaccatgacgtacgagagcgtcatcggtcagggccgcatctcggtcgtgccggacgcggacaaggagcgcgcgctgcgcgtgctcatggcgcagtatcgtgcgccggactttccgtattcgaaggccgtcattcccgcgacgaccgtcctgtgcctgactgtcgagcacatgaccggcaagcgccgcgcgaaaaagcacggctgaatgcaccgcacataacgagcaaaagagcccccgctggcagtgcctgcgggggctgtttttgtgatcctgctgcagatcagcggatgaaattggtgaacttgcgcgcttccgtctccgggcgcgggacaccggcggcatcgccggctgcaatgcactgcagcagccagagcaaattgcgcgcaagctggcgcatggtctgcaggccctcctcgtcctgcgcgacgtcctccgggcgcgcgccgtgcaccatcggccagtactgagaggacacgaccggcatattcgagatcatcgggtatttgaccagctgatcgagcgcggccgtcgtgcccgcgcggcgcgccgagacgacacaggcgcacggcttattcgcccaactgccgccggcatagaacagccggtcacaaaaagcagacatcgcgccggaaatcccggcatagtgtaccggggaagcgagcacgagcgcgtccgccgtctccatcgcgtcgatggcatcgttcaccagcccgccgcgcacgcagcggccggtcgcattgcatccaccacaggcggtgcagccgcccacctgctcggcgccaacggtcaggatctgcgtttcagcgcctgccacctgaagcacctgctccatctcatgcagcgccatataagtgcagccacgcgggtgcgggctgccgttgatcatgagaattttcatcgtatcacctcacgcgcaggatagcacaaatcgccgcgcagcgcaagcgcgcacgcaatgccccaaaacgccttgcgcggcagcaaaacctgctgccgcgcaaaggaaaagaagggacgtatgccatggagtgggggggaaaatgaaaggaagaaatgcgcatggtgatacgggaaacatgacgcgtcgggcagccgggcatacacagccgcccgacgcggagaggaacggcttcgccgctatgcgccgcggcgaaagccggatcaggcagagatcagatggcgctccagccgccgtccacgcacacgatctggccggtggtgtagctgcaggccggggaggcaaagtaggtgcacaggccgtccatttcgccggtctcgccgtggcgctccatggggcagcactcgaggtgcgcctgatggaagaagggcgcgtcgatgtaggccgcggtcatttccgtcgggaagtagcccgggcagatgcagttgacggtgatgccgtcgcgcgcccaggagttgccgagcgagcgcgtcaggttgacgatgccgcccttggccgccgcatacggtgccgtgtccacgcccttacggccgcagacgccgtggatggacgagaccatgatgatgcggccgtactgattgggcttcatggactggcgcacgacctcgcggcaggtgaagaactgcccattgaggtcggtgttgatgacgttgagccagtactcgtccgtgagcgtggccgggtcgccgccgcccggaataccagcggcattgaccagaatgtcgatcttgccaaaatgcgcgacgacgtcgctgacgcagtccgtgatgctcttggaatcctgcagatccatgtaatgcggatagaccttgacgccgtattccgcctcgatctccctggcgttttcatccagacgatcggtgcggcgggcgacgagcgcgatgtctgcgcccgcgttggccattgccttggcgaactgaaggccgagaccggaggaaccgccgcagcagaacgcgacctggccggaaagatcaaacagattgtttttcataataaagccttccttttataaaaaattcagtatggtttagaagaaccagcagttttcgtaggcgctgagcgtggcatcggccatcgtgccgcccttgttggcgtcgccgacaaagacgaccttgtcgaacgcatccttgagctgctgctcgtagctcttgtcggggcgattaccgagcgccatgatgacgatatcggccgggcgggtgacgacctcgccggtgtcggtctttttgagctcgaccgcgccgtcggtcacgccggcaatggcgtgctcggtcaggacctccacgccgctctcggcgagcagggacagcagcttgtagcgcgcggtgcggtagatcgtgacaccgacctccttctgcatctcgacgaccgtgaccttgttgctgtcgcacaggaagtgcgcgacctcaaggccgacatggccgccgccgatgacggcaatgttcttgccctcgaaggagacgcggcccatgagcacgtcctcaatatagtagacattgctgcggtccacaccgggaatgttcggcacgatctgatcgccgccgcaggcgacgacgacgccgtagggatcgagcgcgcgcagcgtctcgaccgtggcgggtgtgttcaggcgcacctcgatgtggtactccttcatctcggccttcatggtctcgatgagctcggccaccatacccttgcacggcgctttcgaggccagcacggcgctgccgccgagatggtcacggctctcgaaaatgaccgggtaataaccgcgctttttcagcaggagcgcagcctgcatgccgccggggccgccgcccacgaccgcgaccgtgcggccggcgccggtcttgaccaggttctcgtcgccgtagaccgtggcgcggccggtgacggggttgatggcgcagtgcaggttcttgcccgcgacgacggacttgttgcagttcatgcagccaaggcacttgcggatgagatcctcacggccggccatggcctttttgaccacgtcgggatcagccagctgcatgcgggacatgccgacaaagtcactcacgccctcctgcaggaagcgctcggccgtctcggggtgcttgatggtgttgacggcgatgacaggcacattcacggcagccttgatggtcttggccagattctttctccaaccctcggggctgtagcacggctcgatcatggtcggtgcgctggcatacacgccgcaggacacattgaagtaatccacatacggctctaggtatttggcgatctcggtgcaggcagcgagatcgttgccgccctcgacgaagtcattgccgttgatgcgcgcgccgacaacgaaatcacggctgacggcggcgcggatgccggtgaggatacgcacgaggaagcggcagcggttttccatgcttccgccgtattcgtcggtgcgcttgttggtgtaagggctcaaaaactgctgcacgagatagccgtgcgccgcgtggacctcgacaccgtcggcaccggccagctcggagttgaccgccgcctgcacgtacttctcgaccaggttgtcaatgtcctcaatggtcatctcgcgcggcagaatggtcgcgcggccgacgacggagttgagctccacactcggagccatggcctgacggccgccgttgcaggccgggggcgcctcgcggccgccgtgatgcagctggatgaagatctttgcgccgtggcgatgcaccgcctcgcagatgagctggaagctcttgatctgccggctgtcatagatgccgagctggatggggttgcaatggccgctgtcggcgtccacggaggtgaattccggaatgatgaggccgcagccgcccttggcgcgatcctcatagaaacggatctgctccggcgtggtgcagccgttccagtcgcccatgagcgcgcccatggccgtcatcacgacgcggttgcgcagctcgaggttgccgatctttccgggctgaaacagtttttcgtacttcatgaggtgtttcttctctttctttggaggattccgaaaccgatgctgtctgcttgtgcaggaacgacatgggatgcggattctgccgccgcatccgtgcctttgcaaatattttaaccatctgttttgcgaatttccatatgcacgaaacaccaaaaaaagcttgattttgtgcgggacagacaatcccgccgccgtgcacaacgatcctgcccgacgtggaaacgaccgccgttgtgtgccgtgcacaacgacccgccgcctttttgtcgcacagcacaacggcagcggttgcgcccgcacccctccgtgtagtataattgagttaaatatttttttaacaattttagtatatccgaggaggcacgaccgtgaaattttccgaactgatcacaaagctgcattcggccagtcagccgcatatgctcatgtacatcgacattcgttccgactgcgaactggcggacgtcaacatccttgcctccggtcagagcgatgtgcaggccggaacgctctattttgccgacgcggggcagctgacaccggacaccgtactgccgaccaacctgctgtactacggcacgctgccgccggagctagcggacagactgacgaacagcgccatgatcgatcgcggtgaatttgccgtgctgtttcagaccgtaaaggaactgctgagctaccagcagtccgaccagcagctctatacacaggtgctgtatatgctctgcaacggtgcggagctggaccgggtgctgaccaaaatgaccgacgtcaccggcgacctgttcgtcgtgatcgacagcacgggaaagctcgtggccaagacgaaaaacttctatgtggactacccgctgtggatgcggagcatcgagcagggatactgcagcgatattctaatggagtacatcgaggaccggcggcgcaaaaacgagtattccctctcggacaagcccttcacgctcttttgcgagcacatgcagcgctatctgctgtgcacgcgcatcgtctacgacaatttcatgatgggctacgtcatcatcgtgagcaagaccggcatgttcagcgcggccgagcagcagatcatcccgctgctgtccaactcggcaaaggagcgcatcgtcaaaagcaacaacggcaactggatcgattaccgcgcctcccagctcaacaacatctttgccgatatgctcgccggcgcgcagaacgtggacatggagcgccgcatgaagctggccaagctgagctttccggagcagaaatgtctggcgatcatccggccggtctattataaggagccggcctactacaaatcccgcctcattccagatatgcaggccatcttcggcaagacggccttttcggtggtcaagaacgatctggtgctgctgctgacagcggcggacggcggcaccatcacgcccgaacagcgcgcagcactggagcagtacacgcaggggcaccggctgatcgtcggcatcagcaactgttttcaggccaacaaccagctttcactccactataacatgctgctgcagaccttgcaattggccaagcagatgcgctcggaccagaagctcttctttttctcggactacgtgtattacgcgctgctcgatcaggtcgaggacaaaagcctgctgtccttcatccggcatcccgcgctcgacacgctcatccactacgaccgcgaaaaaagcgccgagctctaccagacgctgcgcgtattcaccaaatgcggctttaacaaggcgcacacctccgagcggctctttctgcaccgcaacaccgtcaactaccgcatcgcacagatcgaatccatctgcgggatcgacctttcgacgacagagctgctgttttcgctccagctgtcttttctgatcgacggctacctcaacaacgtcgccttctgacggcggccgcagcctgaaaaccggaccggcaaagcttgccggtccggttttttgcgtcaaaaacggtttccggagcaaaatgcggattggtctctatgacaaaattttgaccggatactgtgcacggcaaacattgtcgatttcctgtcaagcaaatataatgggcacaaccgaacaaaaccgatgtgtatcccgcagggacacacgaacgcagctccgcagccgtccgtcgcggcggtgcggagcgctccggacggctgtctgcccggctgccggagcgcaggaccatgtcaatgatagaaaggagaatctcgatggaaaagacgatcgagaatatggatcgcaaccgccttggaatcctgatccgctgcctggtgattttgctcatcaccggcgtgaccaactctgcagccgtatttgtttccccgctggcagcacactttaactggaccgcagacgccatcgcaaacgtcagcacgaccatgctgctgtgctggacgcccggcgctctgatcggcggcacgctcatgtcgaagatcggcgcaagaaacgccatgctgctcggcgccgtgctgttcccgctcggcacgctgaccagcagcttcgtgccgcagtcgtccccgtggctgctgtatgtgaccttcagcttcctgcagggtctcggcaacggcctcgcctacaccgtggccacctatgtctccaccggctggtatccggacaagcgcggcctcgtttccggcctgtgcatggccttcaccggtggctcgtccgccttcctcgcgccgatctgctcgaagctcgtgcagtccaccggcatcatctccacgctgcgcatcgtcggcctcgtgtccctggtcgtgtgcgtcgtgtgcgcgctcggcgtccgtcaggcgcctgtcggctacacgcccgccggctttgccggctccgcctcgagtgcggagacccagctcgagagctataacgtgcgccgcgcgctcaagacccgtcccatctggcacctgatcgtgtgcaccgccttcttcccgacgatgtatatgatcatgttcccgcgcttctccgtgtacatgaccgacgccggcttcacgctgagcgcggccacgctgggcgtgtcgatctacttcatcgccaataccctcagccgcctgttcctcggcgcgctgtgcgacaagatcagctacaagcacgtctacggcatctgcggcgtactgtgcatcctgtccgccatctgcctgatcgccgcgcactcgctgttcatgttctacctcggctatgcgctgctcggcctcggcttcggcgccaccaacagcgtctaccccgtcacgatcaacaagtcctacggcccggtctacgccggcggcatctacggcgtggccctgttcggctacatgatcttctgcacgctcatcacgccgcgcatcagcgccgcgctcgttgcctccaccggcggctacaccgcctcgttcatctatggcatcgtgctctcgtgcgtcgccgttgtgtccatgtacctgatcccgaaggtggatcgcaagcccctcgatgcggccgagaagcaggccgaatctgtgtaatcccgatcggaagaggtgtcaacattgggcgtcatcggctgtatccttggttttctgatcgttatctatctctgctataaagactggtcggtctatctggccacatttgccggcgcgtgcgtcgtcatcgcctgcaacacgctgccgtttatcgacagcctcgtcggcgactatgtcagcggtatgttcaccgccgtcaagagcttcttcttcatgatcctcttcggctgcctgcagtcgaagatctacacggagagcggcgccgcctacaccatcgccgacaccgtcatgaaccgcctgctcaaggagaacatgagcaataccggcaaaaacctcatcggcatgtctgtgatcctggtcatcggcaccatcctcaacctcggcggcatcatcgccggcgtcgtcatcgtgctcatgtacccgatcgcgctggtcattttcgagcgctgcgatatcccgaagaagttcatcctcggcattctgggcgcgggctcgttcaccttcacgctgaccgtgcccggcagcccgcaggtcacgaacgtagccgccatgaccgtgctcggcacggcggccgatgtggcactggtgcccggtctcgtgggcgcggcggcggagatcgccgcgatcctcgtcatcatgaacctgctcatcaaccgcgcccgcaaacgcggcgagcacttcgagctccacccgctcgacccgcgttatgacagcacaggcagcaagccgaagctgatcgtcgccctcattccgatggccgtcctcttcctgctgttcaacatctggaagctcaacatcaacatctgcctgttgtgctccatcgcgctgtctctcgtgctgttctggccgcagctgcgccgcagggatctcaaggccatgctcaacagcggcgccgtcgactccgtgcccatgacgatgaccgtcgccgcaatctgcggcttcgccggcgtcatcaccaacacggacgcgttccagtccatgatcaccgccatcacaagcatcagcatcgcgccgatcctcatctgctgggtcgttgtggcgctcatgtgcatgctcaccggcggctcgtccaccggccagctcgtcgcgctgccgatcatcgcgccgaagctgcaggcgctcggtctgacggccagcaccatccaccgcgtgtccgcgtttgcggccaccacgctcgactccatgccctattcgggcagcatcctcatgctgctgcccatgtgccacatgaagctcaaggaggtctaccccgccctgttcgtgacgaccgtcatcgccacgaccgtcggtaccgccgccgtcacgctcatgtgcgtcctgttcccgggtctcgcctgagccccgtcaacccacaccatatcacaacagaaaggaagtcaagacatgaaagaattcaagaacaaagttgccgccatcaccggctccgccaccggcatcggccgcgccttcgctgaagaggctgccaagcgcggcatgcgcctcgccctcatcgacatcaacaccgagggtctcgaggagaccaaggccatctgcgagaaggccggcgcgccgaaggtcgtcaccatcaagaccgacgtcacaaagtatgaagaggtccgcttcagcatcctgcgcgtcatgcaggagtacggccagctcgacctgatgttcgccaacgccggcatcgccaccgccggctgggtctacaaccatccgcctcaggactgggcctgggccatgaacacgaacgtgctcggcctgacctattacgtgcacgaggtgctgcccatcttcaagcagcagggcacgccctgccacttcctgttcaccgcatccatcgccggcctgatcaccggcctgcgctacaatacggcctaccttgcgagcaagcatgccgccgtctgcatcgctgaggccgtgcgcgacctcgccgagaacgaccccgactacagcatgatgggtgtgagcgtgttctgtcccgaatatgtgcacacgaacatccacaacagcgaggatcaccgcccggccgactacagcgtcccgtgcgacccgttctacgccaccgacagctactgggattaccgccgcctgttcgacagcaacatcaccgtcaagggcatgaaccccgccttcgtcggcccgtacctgttcgaggctgtcgaggagaaccacatgtacaaggtgccgcatatgcacacccacgagcagatccgcgcacgccacagacgcatcgagtccgacctcgagcgtgaggaagcgctgcatgagaaatacgccccgctgcagaaatactgatccgatccctttcttttcgcaacaccccaaaagccccgccggttttccggcggggctttcgcgatttctgtccggtttctatccccgctcacagctcctgcagcatgagggaagataatgtacaataaggtgcgcaaattgaaaatcgcataaaagaagacatagcatgcaggctctggtagaatgaagttaccacacaccattctgaaaggagacagcaaactatgtccgagaaaattgtacagaggaaacgctgacctactgcgattttcccagcgagcattggacccgcatccgtaccaacaacgtgatcgagcggctgaaccgtgagatctgccgccgcacccgtgtggtggggacattccctgacgggaactccgccctgatgctggtctgcgcccgacttcgccacgcggcgggcacccagttgggctgcaagaaatacatgaacatgaagcacttggaggcggctctggacgacgcccccattgccggctgacttcattcagccggagcctgcaaatacatttgcgcataaatcttgacgggatcgccgaacctcacctatactcgtcttctacagcaaaaaatcggtgcagaccttgaatttctgaacatacaggttcaagtatctgcaccttttcaaataattacttgttcagtgctgccataatctcttctttataaggcatcgccggtgctgtaccgagcttttcgaccgccagtccgccggttacattgccgtatataagcgcagcttcaaagctcattcccgccgcaagcgccgcagtaaagccgccgttaaaggcatcacctgctcccgttgtatcaacaacatttacctgaatcggcgcaccggtaaactcagactgtgcatttttggcataatagcccttgtttccgagcgtgatgacaacattcttaactcccttgccgagaagaacatctgccgcctttgaggcgctctcataaccggtaactgcaatgcctgttataatttctgcttctgtttcgttgggggtgatgtaatctatgccgttcaacacctcatcaggcagctttcttgccggtgcaggattaaaaacagtcgtcacacctgcctgctttgccatatcaagcaccttgtaggtagcctccggatttgtttcaagctggcagagaaccgttcccgctgaggcgacagtttctttaagcgcctgaacctcctcgggcttgaactctccgcaggcaccgataattacaatgatttcgttctgtccagtcgcttcgtttacgattatcagtgcagcacctgtgtcagaatttttatcaacaatgatttttgaggaatcgattccctctttgtcatagaaattaagtgccagctttccgaagtcgtcctcaccgagtctggttacaagtgttacatcgcctccggctcgctttgcagctaccgcctggttggagccctttcctcccggtccgcttttgaaggacacacccattaccgtttcgccctctgtgggaaacttaggggttctgccggtaaggtcagttacatagctgccaaatactactatctttttgttttccattgcttttctccttttgctgacacgctgcagctatcacaattatatctgaatatcgaacatttcgtaaaggtcaagtctgtcaatgtgcagaacaagcttgccgtctgaatactcaaagcccatttccctgccgtctgatacgcgggtgatctttgcaggcttttccgtccttatgcagatattgaagtcaaataccggcagaacctcatctgcgtactgcaggttgattgcagacagatatttgccctcttcatcctcccacagctgatactcaaccacatacggcgtatcgtctgaagcgaagcgcatctcaggcacatacttctttacaaatgatgtgaatacctttctgggctgtgtcaggcttgtgttctcaaagggtgcacatacccatattatcttgcccttgccgacctctgcttccatcattgcagggtagtctgttgcgattccgggtgggtctgagtgcatggatgcactctcattgcgcgggtcattcggatccgcttccacctgaagctcgaggtctgcacataccaggaatgagcttgcctgcagtgaatacggcagcgtcagctttgcaagcaccttgccgttcgttgctccttcaagaatatacgcactgtcgtacactgtcaaaggatattttctgctgtactcaccaaacagcgatgccacctcatcctcgggggcaatataggtgattgtttcgtcggtacgtcccgtgatctttccgccgaaaatctcctcaaccagaggctgtgcgctgtgaccgctgatatacgctatgccgccgtcttcgacataagccttcagctcagacatattttccttgctcatattgggcgcatcgctcacgataagcatttttgctttgccccactgctcagggtggaagctggtatacacgctgtagggtatatgcgctctctgcagcgtttcgctgacattgatgctgctgtcaagatgcggtattgccctgctgatgttcttgctctcagagatgtccataggcggcatctcctcgtcgtacttgccatgcagattgaagtatatgcctatatccgtgcagggcttgccctttgagaaatacttttcaaattttgccgcatcatcatatacattcttaaggcggctgtacaccaacggttcatatgtgccggtcatatccactgcgtcaacaaatatgttgctgccgtgattgataaatgacagcattgcatggagcttcatcattacctcggatttaatagtggtatgctcgtcaagagacggctcgcaccttgaggtagtatagttgaacggcagattgggcgtcatattgtagtacattttgcaggcaaaggtctgctgagaaaaaccgccatacaaatcgccggaaactgcatcgcttgcaatcgtggcattctcggttacgcccatcatccagcttcccggcatggtggagttctgcatttcgacaactgcgccgggattgaccatcttgacggaatcgtagatgtactgcatatagtcctgcagccactcctcgcgcttgcgctggaaaagcttccaacgttcgtccttccaattgacaattctcggcatttctccgccgacttccttttcccatcttgctctgcaattgtcgcagtagcatactgtgggccagaaggtcatatccgcaaaaaacgcctcatagggacctacatattcagtgaaatctgcaatctggtctctgcagaactttttgtagccctcgctgttcgggcagcaaaggccgaatcttctgcccttgtcgcgcgaatagtggccgtctatgtctttaattctccactcgggatggtggtcatatgcccagttgttataaatcatgctgaagtatacatcaacatccattccgcccttgtgcatttcatcgtacagccttttgaatgcatcttcatttccgatgagacccgggtgcatttcgccaacctttgtaggccagtaggaatagccgtaatgggactgaatgtacatcattcccgcctcagcacctgttgagataatgtccttagcaagagcctccgggtcaaactgcttaaggaattcgtctctcgttacatttacatgcatatcaagagagtatttcttatatttatcagaatatctgaatgccatgatcgcgctcctttattttatatctgaatatcgaacatttcgtaagcacatacttctttacaaatgatggtgtgtcgtggcttcattctgccaaagcctgtaagctatgtctttttatgctcttttcaatttgcgcatgtttttgaaagagcctaattgaactcaattaggctcttttcattaattcttttcttcttgcttttctttcaaagaatccgctgatacgcttgttgttcagcgcaatacccattacgattatgagcataacacccagcacaacatcctgcatcttgctcgggacacccagagcaatcaatgcattgaacatcatggaaagggtgaactggcttatgaatacaccaagcgtcagattgcaccattcctgaattgcaaatgcaatcagcacgcccataagaggctggaatatcatcgagatactcctcagggaagaaaccgtggtaatgctgtttgcataagaaatctgcaggattgcggtaatgccgataaagataccggcaagcacaaaggtcatatacttggtattcattgcattgacgccaagtgcgttggcgagaagctcctcattacctaccgcgcgaatgtggcaggcaatgcaggttttattgtatatgtaatagaacaagagtgcgcttgctcccaatataatcaaactataggggaatttgccgataatgccgacatcagcgggaattgtcttgctgacgccgagaccgattttctgtgcaagtatctcgtagatgagcagcaggcccagagatacaatgagacagggaatcttcagcagcttgtacacagtgccgttaattacacccagcacaacgccaacggctatgcagccgatgatgaggccgggaattcccattgtgtttccgagagaacctcctatcattgcagcaatgatcatagcagatgcgcagctgagatcgaacataccaattgcgttggtaaagcacattgcatatcccagagttgtagggataatggcttgagacagaacaatcttcagagaatggaagccgtaattatctatgcaggcagtcagaattaaaaagatgaccaccggtacggcaagtacgataaatatattgttctttttttccttcataacagtaaacctttaacaacgattattgtcagtaataatgcagctgctgcattacttttcataaggggaaaacgtgcgtcattcataacacatataaagcaaaaacgcagagatgggtgacggttttttcagtgccggggggagaataaacctccccccggaatttgtgtggtgttaagttcaggctaattgaacgcaattactttgcaaagggaacatattcaacgccgttgggtccctttacgggtgctgcgaggtctgcatgtgcagcataaatgtcggcgaggttgaatgcattaccccaagcgatgatgtcttcaccggttacatcgggattgtaggtgatgaacaggttctgcagctcttcaaaggtgtaagtaggaagtgctccttcgcagaacttgctgtaatccttgaactcttcagcggagccgactgcaccgaaggagatgggaacatcccatgcctgtccaccgaggcggccgccattgaggattgcgttcatctcgagcataccgcaggcaatctgaacggggatgtaaataccgccctgtgcgcaaatgattctatccttctcgaagcaggtgtcgagtccggtcaggaagtcaataacgctgatcttgatgtggttgtcggggtcgtactgctcaagcgcggagagcgtgccgtcgaggatgttcatgcccatggagcaagcgatgtaaacaccgtcgaggtcgggatttgcaacgatgaagctttcaactgcctgtgctgcgtcagctgcctgctggaggtctcttgcctcagcaacaacttgcatgccgtactcgtcaagcgccttctgcatgcccttttcacgaagtgctgcgcaggagctgctcttgtccaaagagatgaggccgatcttcttcatgcctgcttcgcccattgccttaactgctgcatagcctgcgttcaggtcggactgaactgcggtgccgcagaagtagggagatgcgtatacaacatcacgtacctcggggtcgaggatgtcgcgccatgcaactgcccagtaaaccttgttctcttcgcaaagctttgcaaccttgatgagcatagtgtcgttgcaggggcagatggtgatcatattgcagcctgcagagataagtttctcaacgctggaaatcatatgatcggggtcggtcaggtcgtcagcttctgcaactgcggtgccgccgttggggaagttgccgcacaggtaaaccatgttctcaaggtaggaatactgtgcagggtttgcggtgttttccatggggatgccgagcttgaactcgggaagttttgctgcgggatctttcccctcagcgccttgctggccgcatgcacaaagtgcaaacaccataactgccgccagcaagagggcgatgactttcttcatattttttctcctttttcttttcattactctgccggtaatgagaattacaaaattcacttgattacctctacgctctttctttcaaatgtaagcgcaattacaataaggaatataaatcccttgataagttgctgagtcagtgtctcaacgccccacagggtcataccatttgcaagtgccgccatcgtgatgctgccgattaccgcacttctgaacttaacggacgagccgcctgtgatcagcacgccgccgagcatcagcgcctgcagcgcattgaattccaaattgcttgccgtgccgatattagcagcaccggagcggatgaggaagaagaatgcaacaagaccggaggccaaacccgtgaacacatagcttccgtactgaacgagctttactcttacgccggactgtctgcagacttccagccttgagcctattgcgcggcaatgcttgccgaacatggtgtacttaaacagtatgaagctaataataccgaataccagcgcaactgtgattttaagctgctgagaatcgagcatcatcatcttgatgggtatggactgaacacccgactggagcagcaattcaacaaagcccttcaggatgaaggacattgctattgtagcaataaacgagtcaattctaaactccgtaacaatcaagccgttcagcaggccgcacagcagtccgaccagcagcgcaaccggcaggaccaaattgccgcttatagatgatgcgtgtgccgcaagtgccgccgcaagtgccacaacgccgcccagggacatatcgtttttgccctgcgccataacaaaaatcaatgcgtatgtaacaatcagaaggctgaaagcctcgttgaacagcgtgttgaagtttgtctttgtaaatacttttccgccgctgaccgcattgaagaataccaacactaatatgaggcctaatacgggaataatgtcagacaggtgcgccttgatccagctttttgccccgccgttttcatgcttttttatatccgttttcattagaaagcacctatcacctatatcatgtaattaataatatctctgtcggacaactctttgcttctctgaaactcttttgtgattttgccgtccttcatgataagcagtctgtcgctcatacctatcagctcaggcagctcctcggaaatcagtattatggtcctgccgtccgctttcattttttccatgatgcggtaaatctccgctttaacgccgatgtctatgcctctggtgggacagtccattatcagaacggaggcatcgaagcccacccatttcgcaataacgaccttctgcttattgccgccggacagatgcatacaaagctgttccattccgctggttttgatttcgagcgtatttatgtaggaattcgtaaactccttctctctcttatccgtgatgaatatgcccttctgcagcttactcagggacggaaggcagatgttatcacgaatgcttgctgctgtgagaattgcttctttgtcgcggtccttggaaatgtagccgatgcccagcttcattgcatcagtcggatttttgaactcaacgccgccatgatacctggtaacgccgatcgtacgcggttcaagaccgaatatcagcttgcccaactcgtgcataccgcactcgttcaggccgcctatgccgagtatctcgcccttatacgcatcgaacgagacatcggtaacaattccctgcgtaatatgctcaaccgagaggacaacctcgtcctcgtggctcggcttgaaatcctcgcgatagtaggctccgaccatttctctgccaaccatcagctgcttgatcagatcggcattgaatttctccttcggcacctcgtcaatgtaaatgccgtctctgaaaaccgtcagatagtcgcatttttccataagctcatctatgtcatgtgagatgaagattacggacttgccctctgacttcatcttttccatcaagccgtagagaatatcgcggccgttcttggaaagtgcgctggtcgtctcatctattatcagaacctttgggtctgaatacattgctcttgctatctctacaagctttctgtcctcaaaggaaagtctgccgcaggtcattctggcgtcaatgtgctgcatctgaagctcatcaagaatcttctgtgcggcattcgccatttttttcgtatccagcctgatgccgttatgaaactgcttttcttttccgatgaatatgttttccgcaacggttgtgctcgcaaaggtcccctgctcctgaacaatcatgcaaacgcccttagctgctgcgtcaatcatattcttagggcaatacggctcaccatccaggaagagttcacctgaatcatagggataaatgcccgaaacgattgaacacatcgtgctcttgcctgagccgttctcgcccatcaggccgtggatttcgccgggcctcaggcaaaagtgaacatcattcaatgccacagtaggcgggaaagtcttaattatgtttttagcttcaagaagaaaacgggtactcatcagttatcaccatcaacaaattattcgttgagaagctttatgcccgagcttgtgccgagtctgtctgcaccggcctcaaggagtgcaaaaaggtctgccttggtcttcataccgcctgctgcctttacttttacataaggtgcaacattggccttcaaaagctttacatcctccagcgttgcgccaccggtgccaaatccggttgaggtcttaatatagtcggcctttgcatccgaaacgcacttgcaaagtgcgattttttcctcgtcagtcagatagcaggtctcaatgataaccttcagaatcttgtccccgcacgccgctttgacggccttgatctcttcggtaacagcatcaaacttatgctcctttgcccagccgatgttgattaccatatcgatttcatttgcgccgtcttcaattgcctgctttgcctctgcaaccttgattgaagtggtggaatatccgaggggaaagccaattacggtgcatatattgacatccttatatttgttgtgaatgtaatttacaaagcttgccggaatgcatatagatgcagtgccgtatttcagcgcctcctctgcaatggcttcaatctgctctgttgtgctaaacgccttgaggagcgtatggtcaatgtgtccgtatacttcttctttcttcaatgttatatatcctttcagcttttgtgaaaatatttatttatcacaagttttgttcatcctgtaacatatgttaacataaagaaaaatttgcgtcaatatttcaaaacttttttgtgaatagttcataatatccatctctttgtttgtataaaaccaacacttttttaacatccgctctttttagctgttaatcggcagcaattgttaacacattttgttgacatgttaacattttgctttgctgtataacaaaagtcatttatctgattgccaatacgcacattttctcagaataatgcgaaattcggcgcatttcagatgaaatatccggcttataatcgtattaccgcgcctctgtatcccagcaaatctgcaaattttgttaaaaccaaggtgcatttcccctttgttgctattgaattttctctgtcgctgtgataaatttgttataaattaaaaatattacgagcattttgttaaataccgttcagaaaaggagaaggcttatatgaagaacaagcccgagcgtatcagctgtattctctccatcctggcaaacagagtaggtgaatccataagcgcgcttgcctcggaaatcggagtctcggatatgaccatacgccgagacttgcacgagctgtccgcgcagggatataccaccgttatcaatggcgttgcaattctgaatgataaccaggatggctcgaagataaagaaggactatttcattcacgacgagagacagagcatgtccggcagcaaggaggcaatcggtctggaggcctgcaagctcattgagccgaatgatatcgttctgatagatacgggttccaccacagagtgtatgctcaagcacttaaatctggactttcccatcacggtagtgggctacactctgaacactatggttgcctgccagaacagaagcaacatctctctcatttgcggcggcggattttaccacaggaacaccgagcttttcgattctcccgaaggagtcgcgcttatatccagactgaatatcaacaagtgctttatggcagcagctggagtaacttcaaaaggaaacctttcatgcatcgagccgtatgaatttatgtacaagaaggcggctatcaactcatcatccacaagaattctactggtcgactcatcgaagttcggcaaaatgcgtccctgcatgttctcaaatctttcagatttcgacatggtaattacagacagcgatataggcggaaactggattagcctctttgagcaaagcaatctgaagtacataatcgtctgatgcgtgctattatctgttttgcgcatccttagcaccgcttcatctattacaacaagaattcaacaggctcagagtcggaatttcgactctgagcctgctatatctttgacccgcaggtgttgggtgttcaaattctctcggggggcatttgcgcctgtcaggtcttgctttcggtcttggcggtgtccgtcccggcaagaagctcgtccggtaatgtcataagcccctatccactcaaagcctttgtcgtctcccagagaaaaggctagggactgtccgggcggcgaagggagcttttctcatggataagcaccctcgttgtcggactgtctttcagctcggcaataaacagcagactgcggattaccgccgcctgttcgacagcaacatcaccgtcaagggcatgaaccccgccttcgtcggcccgtacctgttcaaggctgtcgaggagaaccacatgtacaaggtgccgcatatgcacacccacgagcagatccgcgcacgccacagacgcatcgagtccgacctcgagcgcgaggaagcgctgcacgagaaatacgccccgctgcagaaatactgatccgattcctttcttttcgcagcaccccaaaagccccgccggttttccggcggggctttcgcgatttctgtccgatttctacccctgctcacagctcctgcagcatgagggaaaacgcctcccggaacgtgagccggctgcgcacggtgagctgcacatccggcgcgccgtccaccgtgacggcgtagagcgtctgcggcggcagattcgtaaagatgcacgaccggtgccttgcgtcgagcgttgcgaccatggtattttcgcgcgtctcgcgcacctgccagagccgcaccgtcacgggcgcatccggcagcgcatccgccgagacgacgagccgcgccgttccggtcgcaaacacatgctcgccgacctcctccgccgtgccgctgacctcacgcgcgacaagatcggtcgcaccggccgggagcgcggcggacacagcgccgcccggctggccgaggatcacgaaggtcttgccgatgaacacaagaagcacggccagcagcacgcccagcaccgcgcagagcgcgcgcaggcagcgcttgcggcggcgcatttttcgcgccagagcgcgtgcgatcccgtccgtaccgggatcctccgccgcgggcgcagcgggcgtcaggtcgcgccgcagctgcgcatattgcgcccggcaggccgggcaggcgtccatgtgcgcctcgagcgccgcacggctgtcggcgctgcagcagccgtccagatagagcggcagcagatccgcagccatgccgcaggtaatcgggttcatgtcgatccctccattcgttcgatgattttgtttttggcgcgaaagtacgtgaccttcgcccacgattcggacttgccgaagatgtccgcaatgtcgcggaagctcagctcgccgagcgtgcgcagcaaaaacacttccttatactgcgcgcccagctcgtgcacgtagcggtagatctgccgcgcctgctcgcggtcaagaaagcgctcgacgaagtccgtctccgccggcaggggctcaagcgcgtccgcgccgaccgtgcgcgcgctgcgccggcagtccttgaggtatgcgtttttcgcaatggcgcacagccacgtctcaagcttgctgtcgccgcgaaacgaatcaaaatgggtgtaggcgcggtaaaaggtctccgccgtgagctcttcggcgacggccgcatctccgcacagggagcgcaggtaacggaacacgagcggactgtaggttgtaaatatgacgtcgaacgtgtccatccttgcccctcccatcttgatgttctgtctataagagtccgctgcatgcaaaaggttacagcggatctgcatttttcttctgccgtgtctgaaatcccacggcagggccattgtatcacagcagcgcggaaaacggtgcaaatatagcaaaagaccgcagtcaaatgactgcggtcttctgtgttggcattgacctatcttcccggtccgtctccagacaagtattgtcggcactggtgagcttaacttccgtgttcggaatgggaacgggtggaccctcaccgttaaaaacaccaactatgaaccctcgtggcacaccacaagggtggtacaccatcagggactcgaaccctggacaccctgattaagagtcaggtgctctaccagctgagctaatggtgctcaaggtttgtctgcaccttcaaaaccgaacagaggatgaagaattcacaaggcggtttgcctgcaatgttcttgtaggtcaagccctcgggttattagtatcggtcagctcaatgcattactgcacttacacttccgacctatcaacgacatagtctctgtcgtcccttactcctaatggatgggagatcttatcttagggggagtttcacacttagatgctttcagcgtttatctcgtccagacgtagctacccagctgtgccgttggcacgacaactggtgcaccagaggtctgtccatcccggtcctctcgtactaaggacagctcccttcaaatctcctgcgcccgcaacagatagggaccgaactgtctcacgacgttctgaacccagctcgcgtgccactttaatcggcgaacagccgaacccttgggaccgaatacagccccaggatgtgacgagccgacatcgaggtgccaaacctccccgtcgctgtggacgcttgggggagatcagcctgttatccccagggtagcttttatccgttgagcgatggcatttccactcacataccaccggatcactaactcctactttcgtacctgctcgacccgtcggtctcgcagtcaagttggcttatgcgtttgcactctatgcacgatttccgtccg

SEQ ID NO: 13963 - DNA, 47740 bp, Unknown
  gut microbiota DNA sequence
ctgtaaggtaagacacagtatggtacggtactgtacggtacggttgggtacggtgccgcgagacgtccgcgtgacgacacccgcgacagcgccgccccgccgcccgccatgcgcacccccgcgcaccctctgccgtcatgcgcgcaagcccttgcagccgcaggctttttcgttcgcatatcaggtgttatgtaaactgctcatcgccgcccgtgtcgaatccgcgcggatgcacgatttcatgtcgacaaaagggcctcaaaatatttcttagcggtttcttagcgcactcttggcacgttcttagcgcgcttttcccgcgctttccgcgcgaagaaaacgacattctgtcgtctgccgcgcgcgcaaaaagggccgccctttcgggtggcccttcgcacgttttttcccttttcccgcccgcgtcacgccgggttgacgtgcacggtgcagtgcttgacgtccgggtagtcgcgctccagctcgtggtgcacggcctcggcgatgacgtgcgcgtcccgcagcggcagcgcgccgtcgaccgcgatctcggcgtcgacatacgtccgactgccgaacagccgcgtcttgatatcatccacgcgcacgacgccgggggtgcgctgcatcgtctcgcgcatggcggcgacggtgtccgggtcgcacgcccggtcgacgagccggtcgatgctctcgtggaagatgccgtaggccaccttgaagatgaacaggcagatgacgatcgacgcgatggggtcgaggatgggcacgccgagccgcgcgccgagcacgcccgcaaagctgccgatggacgacagcgcgtcggaccggtggtgccacgcctcggccttgagcgacacggagcggatgcgtttggccgccgcgatcgtgtaccagtacagcccctctttcacgccgatggacacgaccgccgcgatgagcgcgagcacgccgggggcagccagcgtctcgccgcggacgatcttcatcacgcccgcgtagccgatggccgcgccgacgagcacgaggatgttgcccagcaggatggacgcgatgcactcgagcttttcgtgcccgtaggggtggctggcgtcggccgccttgtgggaaaagaccgcgccgatcatcacgatcagcgaaccgagaatgtcggacgccgagtgcacggcatcggccactatggccgacgagtgcgccacgatgccggcgacgagtttgaacaccgtcagggccgcgttgcacacgatgccgacggtggacacctgcatggtcacgcgcttggcgtcatcgggcgcggtggaagtgcgtgtacgcataaaaagactcctttcgcacaaaaaaagcgcctgtggggcatatgagtcccacagacgcggtgatatcctgtctgctgcggcgcggacgccgcccggcctttcggcctgccattaggagggagtatagcacgtgcgcggccggccgtcaagcggtattttcggttttttcaccggcgcagccagtgcacgccggcgcggtggagcttcgtgccgaggatgagcgcgatctgcaccgggacgccgacaaagaacacggcccagatgttatactgcaggtactgaaaataaaacgccgtgatcgtgctccacacgaacagggacgaaaacacgcactgcagcgtcgtctccccctcccagtggcgggagaagaggaacgccacggcgaacgacaccggcaccgcccacacgaacgccatccagtacatcttgccgatgctgaactgcgaatacaaaaacacgacgaccgcgacgacccacaccatcgtcacccacatggcggcgatgagcaccttcgacatgaggtaggcgtcgtgctgcttttcgccgccggactccgtcgctgcggcgtatgcggccgccacgccgccgtccgtcagcagatcgtccacgcgcagaccgtaaaggtcggcgatggtcttgagcatcacgacgtcgggcagggaatcgccccgctcccacttggacacggccttgtcggagtaattgaactgcgcggcaaactcggcctgggtcaggttttcttcttttctcagctcggcaaggttggcggcgagcgcgcctctcacatcatccatgctatgagtataccacgccgggcgttcggccgcaagagccacgttccacctaaatcctgtcattctcccgctggtagaatcgccttctcccaacgtttctaccgctcgcgcgcgcggaggatgcatttgaaaagtccctgccgtataatgaagtcatgaagaaatgtgattttcctgacgatatgcacgtcaggcatcacctgcaagggagacggatatcatgagcaaacagactttccatctgccgacctggcggcgcaagccgacggcggacgaggccgcgccggacattgccgacagcgagctggtgccctcggagagcgccgcgcgcccgacacgccgcaagcacggcaagcgcacctatgtcatcggcggcgcgttgctggcgctggcgatcgcggcggcgatcatcattcccggcgcggccggcgtcggcgacgatgacggcgccggcggcgcgagcacaacgcttacccgcccggacggcgacccctccggccagaccgcggaggacaatatctacattacgaccggcgtcatggatcaggagacctaccgctccgagacgaccggccagacgaaggcaaaggtcggcttcatcgactacaaccaggccgtgcacaacgtgcgcgtcgtcacgagcgacagcgtctttaccgaggccatcagcacgagcatgttcgtcaagctcggcgagcagaagtacttcaaggacggggcgatcctcgtgcgcaaggccgattccatcagcggcgacaccgccacctggagcgaccagatcgtggccatctcgcagcaggactatgaggacgcctacgggcaggacccgcgcaacctcagcaactacgtcatcagccgcgacacggtgctcaaccccaccatgaccgccaacgacgacggcacctacaccctcaccttcgacctcgagccggccggcgcgagcgcgtattaccgccaccaggtgcgcacgtacagcggcgcgtcgaaaagccccgaattcacggccgtacacatggtctggaccattgatgccaactgggacctcctgcagatggacaccgtggagagctacgccgtgtccatgtccggcctcggcagcctcaactgcacgagcacgctcaccgaggtgttctcggacttcggcgccgtgaccgacgaccagaccgagttccagcactacctcgagaccgaatacgaccccaacaacctcggcaagctctccgacggcggacaggacacgcaggccatcgtgcgcgacttcttccgccgcacgccgaactacagcctcaccgtcacggccaacggccagtcctacggcctgacggcccacgtggacattgaccaaaccaccttccaggtgcgcggcaacgtcgcgggcgtcgacctcttcgccgcctacagcaacgagcgcgtgtacgtcgccttcggcagccagaagatcgtcctgcgcgcgtccgacacgatcgacgcggcgcgcacggtcgcgggctacctcggcgtacagatcccgaacatctcgctcgacgcggccggcatgaccgcgctgacgaaaaacgtcgccatgcagcagaccgacaccggcatgaccatccggctcaacgacccgatgatctccggcaccgttctgctcaccaacccggacgccctgcgcctgacgcgcgcggacgtggcgctcaacttcggcggcgcgcgcatgcacgtcaccgccacgccgtactacggcggcttccaggtgcagtcgctcagcggctacaccgatctgaccggcgcgctgagcctcgtgagccccctcatggacgcggcgaccgccaaaaccgcgaccttcaacgtcgcgctcagcggcccgctgagcctctcgggcacggccaccgtgacccgcacctccggcggctatgacgccgcgctcaccaccacgatcgacggcgtgaccgtcacggccgaatacatcggcagcacggtgtacgtctcggcggggaacatccacgtcagcggcacgggcagcgagatcaaagacctcgtcgcctgggcgggaaagctcgccggcgcgggcgacgccgctgccgccggcaatgcctacgcgcagtttttccgcgagctcacgccgcagtccgccgtgaacagcatccaggacctcgcgtggtcgaataacgcgctgcacgcgcagctcaacatcgcgggcaacgccgtctccgccgcgctctcggccaacagcgtgaccgtcacggcctcgggctggacggtgcgcgtgacgatcaccggcacgtccggctccgccaccacgctgcatcccacgaacggcaattatgtcaccctctcgcagctgcagcccttcgcccccgtgctcgagcgctatgtcggcgcgcaggccatgggcatggacgcgaccgtgtccgtcaacggctacagcctcgataccgacgtcgtgctctcgctcggcaagcccgtcgcagcgcgcgccgtgtcgcagatcctcggccgcgacctgaccgtcacgttctggaacgaccgcgtctatatcgactacggctggcaccacgtcgaggcgtccatgaactcgctcgagcgggcgctctacgccgtgctcaccatcacgccgggcgtcgaccgccagaccgtgcagaatgccatcgaggcctatacctacttcttcgagcacctgtcgtttgcgaatgtcgtcggtgcgatctccgcgttcggctatgccgacggggcgctgaacatcacggcgaacatcgcggcgtcgccgctgtacatctcgctcacgccgagccagatcacgctgcgcacgcaggtcgattcggccaccctcgccgtcacggccacgccgggcagcgcctacgcctccgcgccggatctgacgccgcagggcggcagctaccgcaatctcgatgatttcctcgccctgttcggctgagcaggcgcagcgcataaagctttactcccgcaagtctcccccgcaaagttttcccccaatcgcacagcaagcccccggacatttcgtccgggggctttgctgtagtcgggcggcacagcccgccgccgaagccgcaggggcaaggcccgcctcgaatgagatccatacagaaagccctcggacaaccgtccgggggcttcccatgcgcttcatccaaaacccgccgcgcagcaggtcacacacagccgcaggggagctcgagggggcaaggcccgcctcgaatgagatccatacagaaagcccttggacatttcgtccgagggctttctgcatcctctttttctcctgctgcgcattcagtgcacgctcgcctgcttctgccgcaggctcaggcagtcggcgatcatggcgatgaactccgaattcgtcggcttgcccttgatgttcgagaccgtgtagccgaaaaacttctgcagcgtctcgatatcgccgcgatcccacgcgacctcgatcgcgtgccggatggcgcgctcgacgcgcgagggcgtcgtgttgaacttgcgcgcgacctcgggatagagcaccttcgtcacggagttgatgatgtccatgtcgtcgatggtcagcaagattgcctcgcgcaggtactggtagcccttgatgtgcgcgggcacgccgatctcgtggatgacgtcggtgacgacgctctcgagcgagggctcgggctctgccgcggcgagctgcgtgcccgcgccgccggtgcgctggcgcggccgggccgtctggcggatgcgctgcacgagcagcggcgggtcaaacggcttttgcataaagtacgtcgtgccgagctccgcacactccatcagcacctgatcgttgcagatcgcggaggtgacgatcacgcgcgacgatgcatttttcgcccgcagatgcgtcagcagggacaggccgtccagattcggcagcacgaggtcgagcaccacgacgtcgggctgaaatttggtgatgagttcttccgcgcgcagcccattgtccgtctgggcgaccagttccatgtccgtctcctggccgatggccttggaataggccgcgcggtactgttcgccgggatcagccagcagaacactgattttcgtttccataacattctcctccgcaaaaattcaggcttgcggtcagctctctgccaaatcgctcgtttcccctgtcttgcgaggatattttaccatatctggaatgcgagaacaatgtgatttttggcgaattactctagttttctgttgacataatccgataataaccgtcgaaaggtacaatttttcgaagcaaaccgcaatatctcgcctgcgttcgacagacagaatgtgtcgaatgcatatatgtgttatgtaaaccgatattccgacacgtgtcttgtcaccgcgacagcagccgacccgctgcgcacggcaaagcccgaaaaccgccgcttcggccggcgcacgaccggcggcaccgcctgcacgcagcaaaaagcggaagggacggctgccccttccgcttcatactgtattttgtatctgcgccgcgcgctcagtcccggtcgtcctcgcggtggccgcgggcatccgcgcgctcggtatggcgctgcgcacgctcgtccgcatggtcggcatggcgctgcgctttttctgccagatgatcggcctgccgctgcgcgcgctccgccgcgtgctgcgcgtggcgctgggccttctcggccgcgttctgcgccttgcgggccagctccgccgcctgccgctgctcgcgcgccacctgcttctccgcctgacggcgcaggcgcgcctcgagctgctgctcatggcgcagctgctgctcggtggcgtgctgctcgtgccgctcctgatacgcggccatgtgctcggcgtgccgctcggacagctccgcctgatgctgggcgcggcgagcgctgcgttcggcgcgctcgtgctcgatgcgcgcgtgcagctgcgtccggcgggcctcgatgcgcgccgcgctcgtgggatgatttgcgcggaaatcgtggtcgaggtggtcgcgccgctcgcgcacgtgctcgacgaactcggggtgctcctgctcgacgcggtcgatgaggctgtcgcgctcggcctcgaggtcggtaaacacatcgtcctcggagttgccgagcagcgcggccagctcgtccgtgtggccctcgaggtgcagcagcacctcgtcggtgtcgatgctgccgaagtgaaagtcctcgttgaggaaatgctcgagcatcgtgcggcgcgcgtccttgtcctctgttgtgcgcatgcgcgcgagcaggagctgcacgttgcgctcgatctgcacctcggcgtccgcgccgtagagccactcgagctcctgcagctggcggatatcgtccatgttgtcggggatgcgctgctgcgccccgccgatgtcgacggccgcgtcggcatcgcgcagcgcgccctggatcgtgcggcgcaccgcgccggattcgatcagctccccggcctcgaagtgccgcagctggtcgttgacctcgccgatgtgctcggtcaggtaaaagcgcacgccctgcgcgcgcagcttgcggttgagcacgacgagccggtcgcacgccgtgatgtccacgctcacgatggcgctgccgtcgacgatgacggcctgcgtatcaggctgcaccgcgccctcgatgtcctcctgaaagcggcggatgttggcgaaaaacaggctgccgctgaagcggtagagcacgatgtgcggcagcgcctgcacgccgctgacgcggtcgatcgggaaaaacccggccttgcccggcagcgtgccgaggaaggtgcgctggggcgctgccgcgcgcatgagcacgtcgatgaacgacagcaccatgcccacgagcacgcccttgatcgcgccgagcagcagcacgccgaaaaacgccccggtgaagatgccgagctccacgcggttgacgcgccagagccgccgcgcgatgccgaactccgtcgccccgatgagcgcgttgacgacgatggccgtcagcaccggcacgggcagaaagcggatgagcggcgtggcgacgagcagcacgacgagcatggtcacgctcgccatgacggacacgagctgcgtcctgccgccgttgcgctcgttgacggccgtgcgcgacacgctgcccgacacgacgcagcagccgacgagcccggcggcgacgttgcccacggcatacgtcacgatctcgcggcggccgttgaggcggtagccgtttttctgcgccgtgccggaggaggccagcagcgtctcggccagaatgacggccgcgaccggcagcgtcgccacgagcgcctgcgtaaacggcagcgcgcccagatccggcagcacgaccttcggcaggccgcgcggcacggcggccagcagcgccacgccccagtcgtccagcggggcgaacgcgccgagcagcccgcccagcaccatcatcacgagcacccacggcaccttcggccacttgcgcggcgcgatgagcaaaattgcgagcgtcccgaagccgagcgcggcggtgggccagttgatgactttcgctgcgtcaaaaacgtgccccagcagctcgaacagctcgcccgtgccggtcgcggagccgagcaattttggcacctgcatgaggatgatctcgcagcagacaccgctgatgaacccgcccatgacgggctcggagatgtaatcgacggccttgtccgcgtgcacgagtgcgaacacggccagccacagcgcgacgtacagcgtcagcaccggcacgatgcgcatggcctccgcgccgccgggcgtgacgccgagcgacgcgagcaccgcgccgatcatggcggccggcgcggcgtcgacgccgaagatgaactcccgcgtcgtgctgagcatcgcaaacagcagaatcggcaccagcgacccgtacagcccgtagaccggcggcaggccggccagctgagcatagcccatcgagatcgggatggacagcagcgcaatgagcacgccggagaacagatccggcccgagctgcgcccggtcgtacccacgcagggaggcgaacagcggctgggaaagcgctttcatagtatcacctggttttaatatatagagtgtcccgctcaggcgagcagggggtcaagcccggcgtcgagccgggcgttgcgtttcgccttcggccggtcgatgacccggccgcgcgcgacagggtttccgaggatgcggcgcacgagcttttcgttgtcgcgctgctttttctggatcttgccgctgccggccagatgcacatgcatgttgatgagtccgggcagcagatagcgcccgcgcaggtcgatgcgtgtgtaccccgccggggcagtgccggccggcacgatgtccgtgatcgtctcgccgtccgtgagcacgcacagtccgggctgtacgcacatatccttcgtgccgtcgagaaggtttgcgttgtcaaatgcgtatttcatgctgcgcctctctttccgcggcccggccgcaccgggcaaaatgaataaaaacagaatatcacatttggcaaatatgtcaagccgtgcggcacgtccgacgcgcaccccttggctcccttgtgtaaagggcgctggcagccgtcaggctgactgagggattgacacgttgattcctgcgctggcttcgtatctgcaccccctccgtcgcggcacaaagcgccgcgccgccggtcacgccccgcgcagcaaagcgcgccgggcactgcccggcgcgcccgcacgcatccagaatgtgttgtcttacgctgccttgtcctgcgccgccgacgccgcgagcatgtcgtcgatgctcacgccgtagcccttggcggggtctgcgagcagcacgtgcgtcaccgcgccgatgagcctgccgtcctgcaaaatggggctgccgctcatgccctgcacgatgccgccggtcgcggccagcaggtccgggtcggtgacggtgatgagaaagcgcgtgcacccgccgtcatgatacacccggctgatgtccaccgtgtacgcccgcacgtcctcgcccgcaaccgtggacaggatggtcgcgccgccggttttcaccgtgtcggcggatgccgtctcgaccgcgtccccggccggcggcgcgtccagcgtgccgaaaatgccaaacaggcagttgcgctcgatgccgccgatgcggtcgccgggatcgaagctgccgacgagctccccggccgtgccgtggccgccggggcgcgcgtccgcgataacggccgagagcacgctgccgtcgcgcagcggcatgagcacgccgctcgtctcgtccgagatgccgtggccgagcgcgccgtagcgccccgtggccgggtcatagtacgtgagcgtgccgacgcccgtcaccccgtcgcgcagccagaggccaagctgccgcgtgccgtcggccgtgacggcgggcgtgaccgtcgccgtgacctccgcgcccctgcgcagcacggtcacggacatggtgtcccccgccgcgtccatggcggcaagaaagtccgccgaggacgcgatgtcccggccgtcgatgcggcagatcacgtcaccgggcagcagtcccgcgtccttggcgggcgtggccttgccgccgggcgtgtccacctcggcgagatccgccacgagcatgcccgccgtcgtcatctgaatgccgacggcccggccgagcggcacgagcgacgccgcctgcgccgacacgcccgcgcacagcgcgagcgcgaccgccgccgtgacggcaaaccggcgcaaaaaatgtggttgtttccgcaaaaaatcccccctttgcgcgtgcagtatcagtatgccgggtttcggacaaaatagcggcggaacattcttgctcgattgcctgccggggcgcaaatgcctgcggcggcgtgcatacgatgtacggagccagttttggtaattcgatgcatcggaggcatttccatgacgcaaaccttaaaacagggcgaccgcggcgcgctcgtgtcgctgctgcagctgggcctgcaacgcgcgggacagacgccgggcgcgctcgacggcatcttcggcgcacagacggcagcggccgtgcgcgcgtttcaggcagccagcgccctcacgccggacggcatcgcgggcgcgcggacgcaccgcgcactgctgccgtactacaccggcttcgtcacgcgcaccatccgcgcgggcgacacgttttccgccctcgcgcggcagtacggcacgagcgtggacgccatcgcgctcgccaatccctacctcgaccccgagcgcctgccgctcggccgggcgctgacgatcccgctgccgttttccgtcacgccggcggacattccctattcctcggcgctcatcgggtacgtcgtgcgcgggctggccgcgcgctatcccatgctcgcggtcggggagttcggccgcagcgtgctcggccgcccgctgtggtatctgacgctcggcagcgggccgaagctcgtgttctacaacgccgcgcaccacgccaacgagtggatcacgacgccgctgctgctcacgttctgcgagcagctgtgcgcccgcctcggcgacggcggcgacatggaggggcagaacatccgtgacctgctgcccagggtcacgctcgtgctcgctccggccgtggacccggacggcatcgaccttgtgaccggcgcgctcgacgccgagaccaccgccgcggcaaaggcgctcgctgaaaactaccccgacattcccttcccctccggctggaaggcgaacatccgcggcatcgacctcaacctccagtaccccgccgggtggagcaccgcgcgcgagatcaaattcgccgcgggctacacgcgccccggcccgcgcgactatgttggcccggcgccgctcgtcgcgcccgagagcctggcgatgtacggcttcacccgcgcgctcgacccgctgctcaccctgtcgtaccacacgcagggccgcgtcatctactggcagtatgacggctacgacgtaccgggaagcgaagcgatcgcccggcagtttgccgccgtgagcggctacgacgtcgcggccacgccctacgccgccggccacgcggggtataaggactggttcattcaggactaccgccgccccggcttcacgatcgaggcgggcagcggggaaaatcccctgccgctgagccagtttcccgatatctggtcggataacctcggcatcctgctcggcggcatgaccgccgttttgtgacatttgtcacagcctgcatccaaaccgcccacatggcacattttgaccgtttttcggcaaaaaatgcatgctaagacataggaaagatatagacaaaacaaggcaaatggtgtgtttttcagtgtcacaaaggaggaaattttcatgcagctgtcagacaagatcaaaaaattcagcgtcgagcaggccattgactaccgcaaccgtaacccggtcaagaatctgccgaagctcctcgactgggcggacacgttctgcgccggaaagtttgggggccagcgccgcgccatctcgtccgagggcgacgagacgacgacggacagccgccgcgccatctcgtccgagggcgacgagacgacgacggacagccgccgcagcgaaaaagaagtaaaacgcgcgcaaagaaagcaaaaaattgtgtgcaaagaatgcaaaagcaccgtctcccagtcgggagacggtgcttttccagccttccctcgaggggacggccagggcacacagtcccgcacagggaaaagcgtcatcagcgctgccggtgctgcgccgcgtgacagcaaaacgaaaaaacgtgcatggaagggtccttccatgcacgtttcgggtcagatggggtttccccggcttggccttgcggcgggtcagctgtgctggccgtgggccgggtagtggatgtgcagcagctcgtgggcgcggccctggagcagggtgtcgtagacatagcccaggtcggggttctgctgtgggatgcgcagggcgcaggcttcgtctgccttgaagatggcctcggcgcgctcagccttgcgcttgttgcaggcggggggctggccgccgccgccgatgcagccgttcgggcaggccatgacctcgatgaagtcgaactgctcctcaccggactcgaccttggcgatgagcttgtcggcgttggccagaccgttggccaccgcgatgcggatggtcaggtcgccggccgtgacggtgaaggccttgatgccctcgagcccgcgcacgccgcactcggcaatggtctgcagggtgttggggctggcatcgtcgagcacgcggcggatgacggcctcggtcacgccgccggtcacgccgaagatgacgccggcgccggtgtagtcgccgagcggggcgtcgggctcctcgtccgggaggtgggcaaagtcgatgccggcctcctcgatcatgtcgcacagctcgctcgtcgtgatgacgaggtcgatgagccgctcgccgtccttttccagctcggggcgcgcggcctcgaacttcttgccggtgcagggcatgatggccacggagtagacgttctcgcccgcaaactgcttgcggatgagcgagccgaacatcgccatcgggctgccgcaggtgctcacctggggcatgaggtgcgggtggcggtgctccacgtgctgaatccagccggggcagcaggaggtaaacatcggcagcttcgcgccggtcttgaccttctcaagaaactctgccgactcctccatgatcgtcaggtcggccgtgaggttcgtgtcgtataccacgtcgacgccgaggcggcgcagcgcggcgacgagcttgccggtgcagggctcattggcgggcaggccgaagcgctcagccatgccgacgcgcacgctcggcgcgtactgcacgacgaccttgcgggtctgatcctgcagcatcgaccagaacttttcggtctcgttgcggatcgtgatcgcgccggtcgggcacacggcggcacactggccgcagccgacacagtcggtatccttgagggtcttgccgaagtcggcggagatgtgcgccttcttgccgcggccgctgaaatcgaccgcaccgatgttttgaatttcagcgcaggtgcgcacgcacagtccgcacaggatgcacttgctcgggtcgcgcacgatgctcggcgaggagagatccatcggctcggtgcagtaggtgttgggctcgaaacggtgcgcgtccacgtggtagcggcgggcgtactcctgcagcttgcagcggccgctctggtcgcaggtcaggcagtcggcccggtggctgctcatgagcagctgcagcgtggtgcggcggctgtcgagcacctgctttgtatgggtgctcacgaccataccgtcgcgcggctgcatggagcaggcagcgtccatcttgccgcggtcgttctcgacgaggcacaggcggcagccgccgtagatggacaggttttcacagtagcaaagcgaggggatgtcgatgccgttgttgcgggcgacctccagcacattgcgctcggtcgtgaacgggcaggacacgccgtcgatgatcattttcttttcttcagccatggttcacgcctccttgatcgcaccgaacgggcagccagtcttgcaggtgccgcacttgatgcatttgtctgtgtcgatgtggtgcggctttttcagctcgccggtgatcgcgccggccgggcagttgcgcgcgcacttcgtgcagcccttgcagatggccgggtcgatgacatacgtcgtcaggctgcggcagctgccggtgcggcacttcttgtcgaagatatgctcgcggtattcgtcctcgaagttcgcgagcgtggacagcaccgggttcggcgctgttttgccgagcccgcacagggaggagttctggatcatcttggcgagggagcgcagctcctcaatgtcgccggggcggccgttgcccttcgtgatccgggtgagaatgtcgagcatacgggtcgtgccctcacggcacggggtgcacttgccgcacgactcgttgcagatgaagttcatgaaaaactgcgcgatggacaccatgcacgtgtcctcgtccatgacgacgaggccgccggagccgatgatcgcgccggcttttttcagcgagtcaaagtccatgggcagatccatgtgcgcctcggtcaggcagccgccggacgggccgccgatctgcacggccttgaacgctttgccgtttttgatgccgccgccgatgtcgtacacgacctcgcgcatcgtcgtgcccatgggcacttcgatcaggccagtgttgacgacgttgcccgtgagggcgaaggccttcgtgccggagctgccctccgtgccgacggacttgaaccagtccgcgccctttttgatgatgtcgggcacgttggcaaacgtctcgacgttgttcaggcaggtgggcttgccgtacaggcccttgtcgacggagcgcgggggcttcgtgcgcggcatgccgcggttgccctcgatggacgcggtcatggccgagccctcgccgcagacgaacgcgcccgcgccgcagttgatgtgcatgtggaagttgaagccgctgccgaggatgttgtcgcccagcaggccgagctccttggcctgctcgatggcgatggtcagccggtgcacggccatggggtactcggcgcggacatagatgtagccctcggtcgagccggtggccacgcccgcgacgatcatgccctcgatgaccttgtgcgggtcgccctccatgcaggagcggtccatgaaggcgccggggtcgccctcgtcgccgttgcagacgatgtacttgacgggctcttccgtatgtgccgcgacctgcgcccacttgcgcccggtcgggaagcccgcgccgccgcggccgcgcaggccggaatcgctcacggcctggacgatctcgtccggctgcatctcgaacagggccttggccagcgcgccgtagccgccgatggacaggtactcctcgatggattccgcgtcgatatggccgcagtgctcgagcacgcggcgggtctgctttttgtaaaacgggatgtcctcctggcgctcatacagttcgccgttctgcttgtagcccaggcgctcgatgaattcgccgccgaggatggtcttctggatgatctcctccacgtcgctgacctggcacttcgtgtacagccagccctccggctcgatgcgcaccagcgggcccatctcgcaaaagccgtggcagccggacttcttcaggccgatggcatcggcatggtgctcggtcagggacacctcgcacgggatgccgagctcgtccatgcgctttttgagctcgtggtagacgttcaggttgccgccggcgacacagcccgtgccgcagcagacgagaattttacgtttttccgcgtcgcgcgcggccatgtagtcggcctgcagggcgcggaactgctccaaggattcgattctctgacgcattacgcaccctcctttgcacgcagctcctcgatgagatccacggccttgtcgggggtcatggccgggtgcaccgtgtcgttgaccatgacgaccgggctcaggccgcacgcgccgaggcacgacacgatctcgatggtgaacaggccgtcgtccgaggtcggcttgctctcgctcaggccggtcgcgtcgtagagcgcctgcaggacgttgccggacttgcgcacgtggcacgccgtgccgcggcagaccttgagcacgtacttgcccttcacgtcgagcgagaagttctcataaaacgttgccacgccgtagatcttcgactcgctgatgcccaccttgttggcaatgtagcgcagcgcgtctttcggcagataacgatattttccctgcacgtcctgcatgatcgcaatgatctgcgaggcgtcacaggcgtgatctgcgaggacctggtcaatgaatttgtaatcgatctgttccattttttcagttccctttccaacaaatttgcaccggccggctcctattccggccggacgcaggattccctgcttcccatcatacaatatctatgaaaaattttcaatgcccagtcccgtcgttttgataacgacaaactgcgagaatttttcacaaatccgcacacttttccgcccgtgtgcagcttttggaaattccggcgcaaatgcttgacacgcctgcctttccgtggcataattacagcaaactatgcgcccgcgccgcaagctgtgcttccggcccggccgccgccgatcccgcaccgaatctgacaccgaatcgcccatgaggtggaaggctgcgtgcgtgcactgctgcaccgccatgccttccgggcatggcattttttgtctcttccggcgggcggctacacgaaaaggagagatctgcaatgacccatctgcgcaaactcacggcggtgctgctggccgtcatcatggtgttcgccctcgccgcctgcggccagaaggacgacaccgccgccgtcgacaaggacctgaccgtcaacgtcgtcgcgctcaacggcacgaccggcttcggcatggccaagctcatgtccgacagcaaggccggcacgaccgcgctgagctacaacttcaccgtcgagaccgacccgagcaacgccaccgccgcgctcgtcaacggcacggccgacatcgccgccctgccgacgaacgccgccgccgcgctctacaacaagaccgacggcgccgtgcaggtgctcgcgctcaacacgcgcggcgtgctctacgtcgtgaccgacggcacggagagcatcacgtcctttgccgacctgcgcggcaagaacgtctgcgtccccgtgcagaacccgacgttcatcttccagtacctgtgcgagaaaaatggcctgaccgtcggcacggacatcaccatcgacaacacctatgcccagccggcggagctcaacacggcgctcgcctccggcgaggtgcacatcgccgtgctgccggagccgatggtcacgatcgcccgcgcggccaaccccgccctcaccgtcgcgctcgacctgaccgccgagtgggacaaggtcgccccggccggcagcctcgtgcagggctgcgtcgtcgtgcgcaaggcgtttgccgatgagcacccgaacgaggtcaaggcgttcctgaccgagtatcaggcgtccatcgagtacctgacggccgagcccgaccaggccggccagatgatcgaggatgccggcatcttcgccaaggccgccgtggccgccaaggccatcccgaactgcaacgtctgcttcgtgtccggcgcggacatgcaggccgcgctgacggagtttctcacggcgctgagcaccgtcgccccgcagagcatcggcggcaaggtgccggcggatgacttctactgcgtgctgaaatgaagcgctttgcccgcggcgcgctgacgctcgcgttctggcttgccgtgtgggcggcgctggcgctgctcgtgcaccgggagctgctgctgcccgcgccgtggacggtcgtgcgcaggctgtgtgagcttgccgcgaccggggcgttctggcgcatcacggccgtgtccatcggccgtgtgctgctcggcgtggcgggggcggtcgtgctcggcgtggcgctggccgccgcgtgcacgatatcgaaaaccgccgacgcgctgctgcgcccgctcatgacggtcgtcaagtccacgccggtggcgtcgttcgtcgtgctcgcgctcatctggatcgcgcgcgactggctgccggtgttcatcgcgctgctcatggtgctgcccgtcgtgtggagcaacgtctgcaccggcatccgcagcgccgaccccgcgctgctcgagcttgcgcgggtgtacggctggccgcgcgggcgcgtcctgcggcggatctatgtgccgagcgtgcggccgcactttctggccgcgctgcgctcgggcctcggcttcggctggaaggccggcatcgccgccgaggtgctcaccgtgccgcacagcgccatcggccgcatgatctatgaatcgaagctgtacctacagaccaccgacctcttcgcctggacgctcgcggtcatcctgctcagcgtcgggctcgagcggctggtgctgcgcgcactcactccgcgcgggaaaggaggcggcagcgcatgatcgaaacacgtgacctcaccgtgacgtatgacggccgcgccgtcctgcgcgccgtcgatctcaccgtgcccgacggcgggcacatcgcgctcatgggcccgtccggctgcggcaagacgacgctgctgcgcgtgctcgccgggctgcgcgcgccggacggcggcacggtgcgcgtgtcgccggggcgcatggcctgcgtctttcaggagccgcggctgctgccgtggcgcacggcggcggaaaacgtcaacgccgtgctctccgaccgggcgcagaccatgccgcaggcgctggcgtggctcgagcggctggagctgagcgatgcgcgcgaccagtaccccgcggcgctctccggcggcatgcagcagcgcgtggccatcgcgcgcgcgctggcgtatgacgcgccggtgctgctgctcgacgagccgtttcgcgggctggacgcggcgctgcggcagcgcgtgaccgcgctggtcgcggacgcggcgcgggccaagaccctcgtgctcgccacgcacgacgcggccgacgccgccgcgctcggctgcgcggtgtatgcgtatgccgacggcgcgttccgccgcgacggatgaggtgaacgtgggacacgcactgccccaccggcgccgccggaggaaaccgcacggcatccaacaaaaaaacaccgtctcccggatggggcggtgacttaggaaaacattgaagcaaggaacggtgtagcttaacggctatgccgttctttgctcttttttacttatgttgcgggcattttcgattgcccgtgtgaagtcaaatgcaccgatgaagttatagacgatggtgatttcccgcgttctggatttcttgtcaacatgggaaacttcgatcctgtcaatgaaagcacggagaacagccgcgtcaagctcctgcaaatccgtgtacttcttcacggcagcgataaacgccttaacattggtttcctgctgctcctgctgcttcagatccttgcgcaggacatctgccattgatttcaggttgctttgttccagctcgtagtcatgggacattttaataaaccgttcgtctgacagttttccaatcacgttgtcctcatacagtcgggagataatgcggtcaagctcggcaatccgcgtgtctgcctttgccagcgtttcacgcttccgaacaaactctgcatctctgtcccgcatatcgctctcggctgcgtcctgaatgaactccgcttcatgttctgaaacataggagattgcttcccgcagatttcgcagaacaatttcgtgcagcacaacattcttgatagaatgggtcgtgcagagatccttgcccttgcggtaggtagagcagatgaagtatttctggttctctgcaaagttggtagcgcggcattgatacattttgccgccgtactctgcgcaatacagaagcccggagaacatacccatttcacccatcttggtaggacggcgacgcgccttgcgaatattctgaacaatcaggaacacgctttcctcgatgatcggcggctgggtgttctcgaagatcacccaattctcagggtcattccagattttcttcttactcttgtaggacttctttgtagtcttgaagtttacggtatgccccagatagtctacgcgctccaaaatgcgggaaaccgtttcatttgtccatttgtatgggtctgctgtcggcttgttgctggtcggcagacctttcgcatggcaataggcggttgggttcaagatttgctgctgtttgagccatttagcaatctgcgtgggtcccttgccagacgcgcacagggagaatatcttctgtacgacggctgcggcttcttcatcgacgatccatttctttttgtcctccgggcttttcatatacccatagggcggaatggtcgtcaaatgctcgccggacttgcctttactctgccatgtagcgcgaatcttcttagaggtatcgcgggcatacatttcgttgaacacattgcggatcgcggtaaactcactttcgccgcgtgtgctgtccacgccgtcattgacggcaatgaaatgaacgccaaactccgggaaaacaacatcggtatacattcccacttggagataatcgcgcccaaagcggctcatgtcctttacgatgacgcgcttgatccgtcctgccttgatgtcggcaagcatacgctggaagcccggacggttgaagtttgtgccggaataaccgtcatcctcgtcataatggcggtaggcggtaatcccgtgattcttgcagtagcgttccagaatcttcttctggtttgctatggagttactttcaccatccagcttatcttcctgcgaaaggcgctcatacagagcggtcagaccttcttcctccgcttccgcagatagccccttggcgtagaactgcaaaacattatcgcggatcacgctgcgaagctcattgcttaaactgtcctgcggcttcaagctctgaaaggtaaatcctgtcatctgcactcaccgcctttctcggaagaactgcggtaggcgttgacaatgccatgatatagattctggcaaaggggcagatcgccgtctgtaatggagcaaatcgcaataccgcgctgctccatatcatcaaggaactgcaccgctgcaagatagctgcggtaaagtcggtcaagtgatacgacaacgattttctgcacgcggttctcatggattgctgcgatcagattttgaaacgccggacgctcggcggtcaggccgctgtacccattgtccacgaagaacatataggtatccaatctgttttcctgcgcatggctcaaaagtcggtgcatttgattgtcaaggttcaggtctgtttgtttgttcgccgcacggtagtaatatgcggtgattttgtcgggctgctttttcatgttgcctcctattccggcagccggacaaacaggttatttatattataccagggatctcgctcgccgtcattaggcgggttcaaaattatttgtaccttttttaccccgcaagtcattctgaatcaggcggcgcacctttgtcacggcgtcctcttttgcgccgtctttgacgacggccttgacgatatacgttatatccccgatcttgtactcgcgtacaatcggggacgttgttttcttcacggttgtttccatagaaacaaatccccctttcatgggaaacaaaataactacaaaagggaatgacaaaacagacggctgctggcgcagctccaagggaatttcacccccgcacggttctcgtgcagccctacccatcgcctgcgacgctttgaacgctcggactgtggctgtaaggtcgtatcattatgtgttttgcgcgtcatcgcctgcaaactgccacacttgcgttacggctcggtatttgtcgctcggcatatcctctcggatatacgtcatggcgcaccagccgcccagctcggcgcaaaaggaacgtacccgttttgcctatgatgcgccgccgttctcttgcgggcatatttgtcaaggagcatcggacagaaacgaggaaagggggaacacgtttctgtcaggcgtcagttatctcacgcgaaatgtgagcagtttggtaatgagcttcgtttccaacctgcgccgcagttcttcatccacgcagagatggggattgccgtactcgtcgtaaagctcacgcatcgacagacgggctatgtaccctgcatagtgtttcagaacggcgttgatcgcttccacatcaccgccagcagccgcttcaatgacggtcagcgacaacagacggttattcttcgattgacttgtcatctgttttctcctcccatcaggtttttcagcagctttagggtgcttgtcctgcgataggcaacggaacggcgcaccatgttcagcacatttgcaatttcagcgtcggacatatcgagaaagtaagacagcaggataatatctctgcggtcaacaggcagagcggagattgcttccgccagcgtttcatcatcgatacaaaccgaatggccgatgacttcaaatgtgcggctatccgtgaaataggtatcacggacagcgaactgttccagcacttcgacgggcagttcggaaaaatagacctctcggtttcttttccttgccagcgcgtcttgatagtcccgtgcttcgttccgcagtacctttttgcagaagcaatcaaaggcacgggcaactcctacattgtgcgaatgaggtttcatgtatacaagaaatcccgtgacaaggaaaagtatctgcgcggacgtgagtgcgaaatcattctctttgaagcgtcggcgcgggcgctgaaagcggcgggtatcggtgataagctccccgaccttgccaagctgcgcgaggaatattccagactgtccgaagaaaaggatcggctgtacgctgagtacggaagcctgaaaaaacgtatgcgagaatacgatgccgtcaagcagaacatcgacagcatcctgtcccccaatcgtgtgcaggaacaggataaagccttatagcttctctgacaagcacacattattttcaaacaatttaatgtgtgttcgtcgtttctaggttgacaaccgcacattatttctatataatataatgtgtgattgtcaaagcgaggtgagaagcatgaacgccaaggagaaaatcgaagaactgctggaagcgtcggaggacggcacgatcaccgcagcgcaggtgacggaagccgggctgcaccgcagcgttttacaggagtttgtcaaaagcggtgaaatgtaccgcttcgggcgcggcctgtatgtgcggagcagcgcatgggaggacgatttttacctcttgcagcgcaagtatgggcgcgggatttactcgcacgataccgctctgtatctgttgggctattcagaccgtaccccggcgaaatatacgatgacctttcccaagggctacaatgccccgtccttaaagcaggagaacttaatcatcaagcgcgttgtgccggagaactatgagttcggcagaattgaaatcgaatccccctccggcaatccaattcgtgtttacgatttggaacggacgctgtgtgacatcctgcgcggcagcggcagcgacgttcagatcgttggagaagctatgaaacgctatgcggcgtccaaagataagaatattcacaaactgatgcagtacgcagaccagcttcgcgtgaagcccaaggtgctgcgatacatggaggttttgctatgattacaaaaaatccgatgcaactaaaagcctttatcaagaacaaagcggcagaaaagcatatctcggcgcagctcgtcatgcagaactatatgcttgaacggctgctggaacggatctcgctctcgccctataaaaacaatttcattctcaagggcggattcctgatttccgccattgtgggactggacacgcgggcaacaatggatctggacacgacaatcaagggcttcaccctgacgcatgaagcaatccgcaaaatctttacagagatttgcgctatccagattgccgacgacgtacagcttgaggttgtcggtatctctgacattcgggaaaccgacgattaccccggcatccgggttgcgctgaaagcgaactatccaccgatcagcgtaccgctgacggtggatgtcaccacgggcgacatgataacgccccgcgaggtggaatacacattctccctgctgttcgatgaccgcacgatcagtattcttgcctataaccttgaaacggtgctggcggaaaagctggaaaccgtgctgtcccgcaacattgcgaatacccgtccgagagattattacgacgtacatatcctgtacgcgctgcgcggcgcggattgcgacaaagcgacgctgcgccgggcgctggaacaaacaactcagaaacgcggcagcggcatgatcctgacagactacccggagattatgaaagagatccgcggaagcgatacgcttcgcaagctgtgggagaaatacagccgcgagtatgagtacgcaaaggatatttcctttgatgatacctgtaataccattcagacaattatggacgcaatcatggtgtaaacgaaaggaggcttctttatgggttggctggcagcgcagggcgcgattatggcgattgggcttttcattgggcttgtctgctcggtgatcggactattcttcgggcatatcattctctttgacagcattgctctcggcatcgccgccggagtgtgctgcaatcagtttactgcaattcatccggcgctgtgcctcgtgatcggcattgcaacatttctgctgctattgtggctgcaaaataccagcattggcttctggctcgttggcgggctgctcacgctgatctatgcagcggtgttcgggctgctggcctacttcatttcggagcatgatcccatctggggctgggtgattttcggtctggtgttccttgtggtcggtgcgctgcacctacgcgcacgggataactgaaagcaagtgcatagtcacggcctagagtgcctgtatgccttgctgggcgcggctttgtagcgcggagaacgcaagggtcgtatgtttctttgcctgttatgaaaaccgagtttgaaagcgtgacaaatgagattgaaaggaatgatggtatatgttcaaatatcccttggcagtaacgattgatacaaacatatttgacgcagcaaaattcaacttgggtgatgccagcaccctcagaatactcgaaaactatgttagacgtgggaaaatcaaggttgttttaagtgatattgttgtacgggaatcaaaaaggcacattgcagcgcgggtcaaagaagtctgcggaattgtaaatacagcaagaaatagtgcgttgaaagtatataatgagcatcttataagcagtattggaatgaatgagatgtttagaatcgtagagagcgaagatgatattattgccaaagaagaaaaagtatttgatgattttctctgtgcgatcgatgctgaaattcttggcacagatttgatagatataaattctgtactaagtgattattttggtgcaaagccgcccttcgaagaaagtgggaagaaaaaaagtgagtttccagacgcatttattgctcaacagatcagaaatcgatttggcgaaacggaaacagttataattgttagtaacgataaaggttttataagggcttgccaagaaagtgaaaattgccttttctttaactcattaggcgctctatataacgcaataagcaaagaagatgctgcttacgatgatacaatagccgttatcaaggaactacaattacgcataagcgccgctgtgaacgagtatatcaaagacaacgaaaatatagatgtgaatggcctttcatacgacaaagacgggatagaatctgggtacgattacaatgaattttatctgcatggtatttcagatgtaacattttctgtccactccgtagatgaaatttccgacaatatttctattgtcacgctctcatgtaaagcagatattttcgctgattgctattatgaggattatgccaatgccccttgggatcccgaagaaaaagaatatgtatttgttgatacaataaaaatgcgcgaggaacataaagcacggtttgggtgcagaatcgagattgaccgagcagaaaagacgttcaaagtgtttccgtttacagttattttgggtggcgattcaagacgcaacagatatgaggttgaagaacaccccgtcgaagatgatgaagaagaaattcgggatatggacagagaagcacttggattccaggcgctcggaagctatgaatcatacttagaggataatttacctgattcacatttttacgcagatataatcgcaaggtttgaggaaataaatggcttataccgaaagtatgatgactgctgtattagttttgatgatttgttggccgaacttaatactgccaatcccaaagagatcatcaaactgatatacgaaagattgttggaagtatcagatataccacacattgccaatatagaaaacatcacagattccgagattgaagaaatccaagcatgggcaaatgctcaatatgaaagagcatctgagattgcggatatagacacactgccagatgtaatatctttcggggaaacgattgtaattaagggcgtagacggcggtaaagcatcattgtccataggtgataatcagataagtcctgacgagggcagcgaagaagttattgatatttgcttttctaacggggatgaaaatacgaccagcggatatataaaactgactgttggctatttgaatttcgatgaagacgggggagcagcggatggtataagtgatgaggtagaatacgaatatcacgacatactaaaagaattggataatttcatttatgctcaaaattgtcttattgaaaaagacactcgtattgctgagattatcagcgaagccataaaaacaaatggtgacaatacctaaaataaaaaacgcgggacgcagcagccatcatcggctgccgcgccccgcgtcatcttttattctgcgtcggaaagcgtcatggtgaactgcgcttcctcaaatgctgcgtcggtcatgttgtgcagcttatggatcgtctgctccgccagcgggcgcatatctgcgtccatatccggcagcgcgtcggaaatcgccgcaatcgttctgcggcggtcgtgcttgtggtaaatgcaaatcaagttttcttcctcaatggtgaacgaaacattgtccatgctcatacctccaaatcattatctttcgcctttgccgctgcctttttgggtgcagcggccttttttgactgcccctctttgagctgtgcccggacagagggacgctgcttgcgcagcggaagatcacgccgctcgtccttgctgataaaagcgaaaacgccgtgcctgtcctttatcgaagaaagatacagcgtcttatacggaagcagcgcaaatagccgctcatgctccttgctggatgcgatacgctcaaaccacggcgacacttctactacaaaatgcgttccgttggggctgttgggcgcttgcagggattgaaacgccgccgaaaggcgctgtgcttcggcaagcaccttttcgtcggagagccgcccgatatgctccttgaaattgccaggtttcagccgttcacgctttcggctttcgtcgcgcagcagatcccgcagcgcgtccgggtcatgcggcacagcctcatagcgcacgaactttccatgctcccgatccggcgtcgcttcaaagcggtattccttgggcatctcccgtgagccgttttcatagatcaaacggttattatctgtccgcaaggcggtctggattgcaagctcggctttcgctacatagtccagctcataaatgctgccttttaccttgccgctctccacaccggacagcaccacggcataggcaagtacacgctccttggtctgctcatggtagaaacggaacgtattatgctcccgcgttccgcgcagaaacacatcccgttcccgcaggcaatgcgttccgttggggcgggaaaaccatagatagaccttatcctcgacatttttactctttgccgcccgcgtcagaatcttcttgtcaatgtcaaaatcgttctgaaaggctgctgtgttctgctgcatgatctgttgcagggatgccagcacatccacattttcaaacttattcataggtcactccatttccaaagcctgccggatgctccgtttggcttcctgttccttttctcgctgctgcggcttgcaggactgcgcacgatccgctttgagctgtgcgcggatagatggctttttgccgtccgggtcgcgctgcggtgttctgccgtcctcagccttgaccgctgcggcaagcgcagagagcgagatcacctcgccgcgctttgccttttcttccagctcgtccacggacggggtgttgttgatctgtccgtcaatcatgttgtagttctgctcggtggatagctccgccgtgcgcatatagttttcctgctcccgctgctcggcggcaatggcaaaggcctgtgtgccgttgcccatgataaggtacttgccgtcatcggtgctgtggtgatacccatagcctgcggtttccatctgctcacgggtcatatcggtaacgtggaagctgccacgcggcgttgaaacgcgctccccggtcaggtgggcgtcaggggcagcggattcctgctgctggacgctgcgctgcacgtcaatgggcttttccccggagataggctgaatacaggaaatataccctgcggcgtagtatgcgtttttgttaagctggcgctgccatgcgccgacgctgggcgcccagcggaagccgtttgctttcagctcgtcccgcgctgcttcatccggcttgccgtcaaagaacacttgcagacggttatctgctttgttggcttccacgcgcccgccgtcaaattcccatcccgcaaaattggtttcctcatgctgccgcacctgttcaatgcgcccacggatgcggcggatctcagcgttgttgttggagagcatataggcggggtacggccggctcttatccagatgccaggactgcgacatttcctgctgcaatttggtgatctgctccggcgtcagactggggcagccctccaaagtcttattcttacggaaataggcattgacggctttcatggtttcctgcgccgattccagcttgacgagcttggcttccagctttgccgctgcctgcgggtcgtccatgacaaactcgatgtggctgctgttcagcttcaagaatttgctctttaccagctcggcagggtaatcgtcgccagcgatgcggagcgtctttcgcgcagagcagacagtttccagcataaggtctacgatctcgtccaaacgctccttgtccattttcgggtcctgcgtgagcgtgtcatactcgatattctccatgatgatttcacggtaaatatctacggcgctctgtttgaacgcttccgttcctttccgttccggcgcagccctgcaaggtgaggggtcaggggaaaggataggaaaggaatcggtacttgatagatccgtaattgatttttctttctttgataagttagttcttgatctgtctttatttaattgcgttggattttccgacgtcggattatccgttgtcggattttccaacatcggtttacccggtattggattttccaacatcggctgcggctgctcatagatggtatattcgatagcagtcattttgcctttttcatcgcgcccctgccgccgcaggatatatccggctttttcaagctcccatacggcggtgcggatcgcgtcaatgctctcacggttgatatgggacagccctgcaagggtatagtcccaatcctccggcagggacagcatttgcgacaacagccccttggctttcaaggtcagctccttgtttcgcagatggtggtttgacatgacggtgtacccgctgttgcgctccacccgaaatactgccataggttatcagctcctttcgctcacttcgctgtgccgcgacggatggcggtcagcttgcccggctcatacggacattccgcatacacacagaactggtacttccaatgcggacggtaaaagtgacaggtattgcaatcctcacagtcggcacagccgccgttttcgtagcggtcaaagccgggctttccccgcatgagcatttcaaacgcacggctgctgccgttcgtaaagtacattgtggctgcacctcctttcagatttgggcagaaaaaaacgccgtagacttttctcaaaatctacggcgtgggcgtatgcgaaaagggatgctgccttgcggtaacatcccttttgtcgcttagttattcaatttttgagctaacctgtttgccctctgcccttaaaagcgttgattttactgggtttctgcttgttttcctatgtcaacgctcttgatgggagacggtgttttttgcacgcactgcgttttcaagacccgctgccggacgtctgcgtgggcgccgtgacctccgtgcgcgtgacgcccttggagaaggtcaggctcttgaggatggccgaaaagtcgttggacatgctgcggtagaggtcggcgttctcgttggcgaactgcacgtcggtcggcagctcggcaataaggttgtagttcgcgccgtcgacggtcaggccgcagatggcctgatactccggcagcacggtatagtcataatcggtgggaaagacctcaagcatgaacagaaagccgcccagaccgttgtcatagtcggtcttttcgtaaaagccgacgtaatagccaccgtcgttggcgccgcattcggtcaggtaatcgtcgccccagctggccggcagcgtgacggaaaaatagccgcccttgccgtcgtcatacgtcggacagagggtgatgttccccgccttgtcggccgcaaccgtcggctgggcggacgcggcggtcttctcgctacggccgcaggcggccagagacagcgcgagcgccagcgccagcacgagcgccgggatgtttcgtttcatgcagatcgctcctttccgaatcttcgcacgggaatattatacgccgccggcccgcgtgtgtaaacctctgggccgggcggcgcgcggcgcgcaaaaagatgcacgtcagatattctgacgtgcatccgagcgaaaggttccggtttttttacgcggcggcgggcttgctgtgcttgcgcaggacgatctgcagcacgatgacgaccacgatgaccgcgacgccgacgacgtcggtcatgaactccgggtcaatcaggcacaggccgccggcggcgagcaggatgcgctgccaccagggcgcgcgcgtgacgatatagccctcgagcgcggcggcgatgccgaagatgccgaggcacgacgtgatgatgacctgaatggcggcgagcacgccctgatccatgagcagcatggaggggttcatcgcaaagatgtacggcacgatgaacgccgcgatggcgagcttcgtggcattgatgccggtcttcatggggtcggacttggcgatggcggagccggcgtaggccgccagcgcgaccggcggcgtgatatcggcgacgatgccgaagtagaacacgaagaagtgggccgcgaccttcgggatgccgagcgtgatgaggatcggcgcgcaggtggaggccatgatgcagtagttggcggtcgtgggcacgcccatgccgagcacgatgcagcagagcatcgtcaggaagagcgccagcagcagcgagagcgtcgggttcgggatggcgctgctgatcgcaatgacgccgctgatgagcttggacgccaggcccgtgacggtgatgcagcccgcgatcatgccggccatggcgcaggccacggcgacagtgatgctgcccttgccgccggcctcgagcgagtcgaggatcatgcggccggtctttttggcggtgatgccggcgacgctgccggtcttggtctcccgcacctcggccgaggcgtcacagatggtgccgaccaggctcacggcgatggagatcaggatggcgatcgcggcggaaaactgcagcgagcggatgttcgccgtgaccatccagatcaggaacacaagcggcagcagcagatagacgttgcggatgaggtacttgaagcggggcagctccgagcgcgggatgcccttgaggccgagcttcttggcctcgagatgcacggagatgaagatgccgccgaaatacagcacggcgggcaggatcgcccagagtgtgacctgaccataggtcacgcccatgtactcggccatgaggaacgcggccgcgcccatgatgggcggcatgatctggccgccggtggaggccgccgcctcgacggcgccggcgaactccggcttgtagccggtctttttcatcatcgggatcgtgaccgagccggtggtgacggtgttgccgacggacgagccggacaccatgccgcacagcgcggacgagataacggcgaccttggccgggccgccggaggtccagccggcgatggcgttggctgcgtcaatgaagaagctggcgatgccggttcgctcaaggaagccgccgaagatgatgaacacggcgatgaacttcgcgcacacctgcacgggcgtgctcagcacgccggacgtgccgaaaaagagcgtgtagatcacgcggctgagcacctgctggaacgtctgcccggcgttgagcatactcacgaacgtgtacacgagcagcgcgccgacgaccacgaggatcggcaggccgacgcagcggcggcacagctcggccagcacgaggatgccggccacgccgacggcgatgagaaacggcgtcatcttggcggcgctggtgagcgtcttgatgagcacggagtagttaaagcaatagtagaaaaacgcagccgcgccgatgaccatgatgacaatatcgtaccacggcaggcggttggcgtgcacatgcttcttgctggcggggtaggtcaggtagcccatgatgacgatcagcccgaggaacgcggtcaggcggatctcgagcgcggccgtgctgaacagcgtcgaccagatgcagtagatcgaaaacagcgccatgacgacggagataacgatcttgggcttgcccgcccagatgcgggtggcggattcgcggtcatacttgcgcatgacggcgtccatttcctcctgcagcgaagcgcttgccgcggcgtccgcggcctttttgttgtcagacatagagggaaacctccgttccggttaggatggaaaagctacggcgtcaggggtactgacgccgtagcgaacgtttacgggatgcagcgcatcaccgcctcgggcatcaataggtgccggccttgatggtggcggcggtgtagtacggggaagcggaaagcagggactgcacgtggctgtcgtcgaggctgacgaggtagacgctgccggcggtggcaaggtcggtgatggccgtggtgggcgcaccggcgacgatgaacgcggcgtcgatcttgccgtccttcaggctctcggcgctgtcgccgaagctctggtacacggcggagatgtcagactccttgaggtcgtaagcgctgagcacgtcaatggcgttgaagtacacgcccgagccggctgcaccgatggagaccttcttgccggcgaggtcggcaacggtcttgatgtcggggttggtggtgacgatctgcacctgctcctgatacagctgagccacgacggagaagccggtgacggggctgtcaaacaggcgctggccgttgtaggcgtagttcatgacgtcgctctgcacgaacgcgagctggacgttaccgttggtcagatcctcaacgttggcctgagagccgccggaggtgagggccgtgaccttgcagttggacttgccggagacgaaggaagcgagcacgccgccgaaggcgtagtacgtgccggactcgccgccggtgccgaagctgagcgcggaagcggtgccgttgccggcgccttccttgaccgcatcgaccttgaagcccttctcctcaaagtacttggcagcgccggggtgatacggcacgcccttgacggaggcggcagcctcgatgctcagctccgcgcccttggcgtgctgagcggtgatggcgtcgagattgtcaaagatggtggatacgaacgcatagatctcgtcggtcgggacatcgtcgcgggcgatgacgatcgcgccgacggagacggtgttggtatcgaccttggaagcggaacccgtgtcgtcggtcttggtgtcggtattgccgccgccgcaggcgcacagcgcaaacaccatgacgagggcaagcgccagcgccacgattttgttgaacttcatagttgattctctcctttttgaaattttcctcttgcaaagattcaatatgcgttcattatacctgcaatttgtgcaaatttcaagcgaaaaatgaaactttatgcctgttcgtgtgcaaaaactttcacacactaacagttttctgatacaaatcgccacatcttgcgccgcttgggcaaattttcccactccgggcacaagatgcctcacacaagtaagcaaaaatccggcctgtgcaaaatttgcacaggccggatcatcgaccggaatgcgttatgcgtccttgtccttgtccgcgtccgggtcgggctgcacgagcacgcgctcgacgcggcggccgtccatggcgaggaccgtgacggtgaggttttcgtaccggaagctgtcgcccaccttcgggaacgtgccgaagcgctcgagcgtccagccgccgacggtggtgctgtcggcgtcgtcgagggcgtcctcgttccagtcgagcagctcgagaaagtccgagagcgtcatggcgccgtcgagctcatagccgccgtcgggccgcgtgacgacctcgttttccaccacgtccttctcgtcccagatgtcgccgacaagctcctcgagcacgtcctccatcgtgatgacaccgagcgtgccgccgtattcgtccgtgacgacggcgaggtgcttctgctcgcggcggagctttgccagcacgtcgggcaggcgcgtggtcttgtagacgaagcacggtggaatgagctgcgcgcgcagatcgtccggccggccgtccatcatggccttgaaaaagcggttgagatacaggaaaccgatgatattgtccacgctgccggagtagaccggcaggcgggaatacgacgaatcgttgatgatgcgcacgatctcgtcccagtcgtcgtcgatgtcgatggcgaccatgtcgacgcgggcggtcatggcctcgctcgcgctgacgtcggaaaagtcgagcgcggagcgcagcaactcgctgcggtcctcgtcgagcacgtcctcgtcctcggccgtctcgatgatcgactgcagctcctgcgaggcggcctcctcgggatcgccgtcaccggcatcgccgtgcagcgggcgcgtgatgaggtgcacgagcccgacgacgagccagatcacggggtagaggatgaccgacagcgcgcggatgatataggcattgcgcagggcgatgccgttggcgttctgcttggcgacgatcttcggcatcgtctcgccgaagatgatgaccagcagcgtcagcacgacggtggacacccacgtccactgctcgcccgcgagcaggatgacgatcacggagccgagcgacgacgccgcgatgttgacgaggttgttgccgatgaggatggcgctgagggtgcggtcgaagtggtcgaggatgccgacggccgttttcgcgcggcggtcgccgtcctcggcggcgttttcgagccgcaggcggttggccgacgaatacgacatttccgacgcggagaagaacgccgacagcgcgatcagcacgacgagcgcggcaaaataccacacgatgctcatgccggctcgccccctttctccggggcggcgtccgcgggggcggcctcgtcggtctcctccggcagcaggcgcacgacgagcttgacgatgcgcttttgcttcatgtcggaaatgcgcacgtcgagccggtgatagcggaagccctcccgctcgcgcgggatgtaggaaaactgctcatacgtccactcgccgagcagcttgtagcgcagctcctcgtcgtcctcggggtcggtgtagtcgagccggtcgaacacctcgccgacggtcatctcggcatcgacctcgtagcggccgccgccgagcggcacgaacaactcctcgaccacgtcgtcctcgtcccagatctcgccgacgagctcctcgacgatgtcctccacggtcacgatgccgagcgtgccgccgtagttgtcggtgacgatggcgaggtttgccttgcggctgctcagctcgggcagcacctcggcgatgagggtgctctggtgcacgaacacgggctcgtcgagcagggggcgcacgtccacggccttgccgccggcggcaatgcacgccttgatgtatttgcggatctgcaggatgccgatcacattgtcaatgctgtcggcatacacgggcagacggctgtggcgctgctcgcgcacgtaggcgaggatctcctccgggggatcgtccacgtccacggcggcgacgtccacgcgcgccgtgatgacgctctcgaccggcacgtcggcaaacgacagggccgagctcatgagctcgccgcgctcggcggtcagctccccgtcgtcggtcatgttctcgatgatgtcggccagctcatcctccgtcacggtcacggcgggctcgctctgtacgcggcgggcgacggcgttgccgaaggcggtgagcagggccgacgggggcttgaagagcaccatgaaaaaccgcagcgagcgcgccgtgcgcatggccagccgctcggcgtatttcttggcgatgctcttcggcagcatctcgcctgcgaagaacacgaccacggtcgtgacgagcgtgccggcggtgacggcccacatgccccactgccgctgcacggccacggtcacgagcgttgcgatcgtcaggtgcagaatgttcgtgccgatcagcagcgtcgtgatcgcctgatcgaagtggtcgagcacatacagcgcctgctcggcgcggcggttgccgtggtcagcggcggctttgagccggatgcggctcgcggatgcaaacgctgtctccatgacggcgaaataggccgcgccaaggagcagcacgatgataacaggcaaaatattccataaatcctgcttagggccagcgtccattgcggatcatcacactcctgaatacctcccccggccgatgcctatccggtcgggagataaattaacgttcatgataccataaaatgcccggcgcgtcaacggcttttctcctccgtgacggcgacgttgcccggccctgccagctcgcgcagctcctcgacgagcgcggggtgcacgacgcagcgggccgcggcgcgccggcccgtgtcctcaaacacgagcacaagctgctcgtcgccggggaacatctcgaggatgagctcgatgcgcttcacggccgggtggtccttatccggcagccgcacccagagccggtgacgcttcggcggctcgggccgcggcggcgggtcgcggcgcggcggcgtgcgcagggtctcgagcccctgctccgtcagcggcaggaccttgtccgccacgagctgcgggtcggattcatcccgcgtcgagatgcgcccggcgacgaacagcgcgggggtttcctgcgccagcaggtcgcggcaggcgtcgagcgcgggcgaaaacacgagcacctccatgctgccgctgtcgtcctcgagctggaggtaggccatgcgggtgttcttgcgcgtggcgcgctcgcggctggcggtgcagataccggcgagcacaacgcgctgcccgtcgcggtagcggtgcgcggccgtggccggggcgtggaagcttgcgagaatgtcgcccatgggcgcggccttggcctgctgcgcgagcgcgcggtagtcgtccatcgggtggccggtgaggtacagccccgtcgtctcgcgctccatggctatgagctctgcgcgcgtgaactcctccacgtccggcagcacgagctgcgtcgtgtcggcgggcgctcccccgtcgtccggcgcgctgaagaggttcatctggccggtgaggttcatgcggctctcgctcgccgcgccgcccagcacgcggtcaaccgactgcatgagcgccttgcgcttgtagcccatgcggtcgaagcacccggcgcggatgaggctctcgacggcgcggcggttgaggtcgtgcccgttcatgcggcggcagaactcgtcaaacgccgtgaacggcccgccgatctcccgctcgcgcatgagcgcctggatgagtccgcgccccacgcccttgatggccacaaggccgaagcgcagatcaccctcctcgacggtgaagtcggcgtcggacgcattgatgtccggcggcagcaggcggatgcccagctcgcggcactcggcgatgtactccgtgaccttcggcgtgttgtcgagcacggaggtcaaaagcgctgccatgtattcgtgcgggtagttgcgcttcatgtacgccgtgcggtaggacacgatggcgtaggacacggcgtgcgccttgttgaaggcgtagcttgcaaaggcgaggatctcgtcgtaaatttcgtttgccgtccgctccggcacgccgcgcgccaccgcaccggggatattccgctccgggtcgccgtgcacgaacgcggcgcgctcggccgtgatgacggcctctttcttcttcgacatggcgcggcggatcatgtccgcctgcccgagcgagaacccggccagctgccggaagatctcgatgacctgctcctgatagacgatgcagccgtaggtcacggacaggatcggctcgagcagggggtgcttgtaggtgatgcgctccgggtgcgccgagcaggcgagaaaccgcgggatgctctccatcggcccggggcggtagagcgcgatgacggcggtgatgtcctcgatgctgcgcgggcgcagccccatgcacacggccgtgatgcccgcgctctcgagctggaacacgccgacggtgcgcccggcggcgagcatgtcaaacgtcttcttatcgtcgagcgggatgcgctcgacctgaaaccccggctcgcggcggcgcacctgccgcgccgcgtcctcgagcacggtgaggttgcgcaggccgagaaagtccatcttcagcagccccagctcctcgagcgtcgtcatctggaactggcacacgagcgcgccgtcgttgctcgccagcggcacgtaggcgcacaccggctgctccgtgatgaccacgcccgccgcgtgcgtggacgcatgccgcggcatgccctcgatggcgcgggccgtgtcgatgagctggtgcagccggtcgtccccgtcatacatggcgcgcagcgtctgcgactgctgcagcgcctcgtcgagcgtggtgttgatgccgccggggatggccttggccacagcgtccacctcggcgtaggtcatgttcatgacccggccgacgtcgcgcactgccgcgcgcgcggccatcgtgccgaacgtgacgatctgcgccacgtggtcggcgccgtatttgcggatgacgtagtcgatcacttccccgcgccgctgcacgcagaagtccacgtcgatatccggcatgcttacgcgctcggggttgagaaagcgctcgaagtagaggttatactgcacggggtccacgtccgtgatgccgaggcagtaggacacgacgctgccggcagcgctgccgcgccccggcccgacggggatgtgctgggccttggcgtagccgatgaaatcgctcacgatgagaaagtagtccacaaagcccatgcgccggattatgttgagctcataatccagccgctttcgcacctccggccggtcgccgtagcgtttggcaaagccgcgcgcgcacagcttcgtgagataggcgtccgcgtccgtctccccctccggcagcagaaagcgcggcaggtggtagtggccgaacgtgaagtcgaaatgacaccggtcagcaatgcgctgcgtgttttccaccgcgtcgggatattcgtcaaagagcgcgcgcatctcggcctcgctcttgaggtaaaactcgtcgttcgggaagcgcaggcggtccgggctgtcgagcgtctgcccggtctggatgcacagcagcacgtcctgatcgtaggcgtcctgttttttaatatagtgtacgtcgttcgtcgccgcgagggggatgcccgtctcgcggtggatgcgcagcagcgccgcacgcacgcgcgcctcgtcggtcatgtggtggttctgcagctcaaggtagaagttcccctcaccgaagagctcctgcagctccatggcgcgtgccttggccgcctcataatctccccgcagcaccgcgcgcggaatgtcgcccgccacgcagccgctcaggcagatgagaccgtctgcatgtttgtgcagcagcggccagtcgatgcgcggcttgccgtaaaacccgcgctcgaacgcggccgacacgagatagcacaggttgtggtagcccgtctcgtcgcggcagagcaggatcaggtgcgtgtaagcatcgtccacgccgtggacgcggtcggtcatgccgcgcggggcgacatagacctcgcagccgatgatcggccggatgccggcagcgaccgccgccttgtaaaaagcgaccgcgccgtacatgacaccgtggtcggtgatcgccagcgcggtctggcccagctccttggcgcgctcgatgagcggcccgatgcggcatgcgccgtcgagcaggctgtattcactatgtacgtgcaggtgtgcaaaccccatcgtgcgttcctttcagtcgtccatgtgaaattccatgagttttttcagccggtagttcaggcagctcttcgtcaccggcggatacgagagcgtggcgaggtcggccaggctggcctcgggattggcaatgcgcagcagcgccgcgctctgcagcttttccggcagcacgtcgagcccgtagtcgcgctcgatgcggcggatggcgtcgatctgctcctgcgccgcggcgacgaccttgtcggcgttggcggtgtcgcagttgaccttgcggttgatggagttgttcatggacttctccaccttggcggacatgatgtccatggcggcgcagggcgcgccgatcttggtcaggaagtcctcgatggcctcggacttcttgaaatagagcacggtgttcgcgccgcggtcgatgctgcgcgcggcaaagcccagctccgtgagcagggcggccgtctcgcggctgacgctcgcgtgcgccgtgatgagctcgaggtggtagttcttgctcggggcggtcacgctgccgcccgcgagaaacgccccccgcaggaacgacgccttgcagcagtcgttttcgagcacggcgaggttgatgtggtgcgcgaccgtgcgcgagagatcagcgccgaaggcggcgaacaccgtctcgacggcggcgcggtcggtgatggtcagcacgtggcggccgccggccttttccccggccggcagggcaaagtgcgcgccgaacgcgcggcgaaacagcttcggcagccgctcggcaaaggcgtcgcacgccgtgacgatgcggatctcccgcgtcgtgaacgtgtggcagtacagcagcacgccataggcctcggccacggcgcagcagtggcggctgaccggcacgcggcacagctcgtttttcacttcggatgcaaaggacatggcgcgcctccgtcaggtcttgggaaagtcccggttgcgcaggcggacgttggcgtcgcgcgcggcgaggtagtccgtcagtaccttggccacggccacgctgcggtgctgcccgcccgtgcagccgatgccgatcgtgagcgcatagcgcccctcggcggcgtactgcggcaggagaaaatcgaccatgtcggtgagcttggagaggaaatttttcgccacgtcgctgcgcaggacgtattcctgcacctcggcgtccatgccgctcatggggcggagcttttcgacgtaaaacgggttcggcagaaagcgcacgtcgaacacgaggtcggcgtcgatcgggatgccgtacttgaagccgaaggacacgacgttgacgagaatgtcgcgccgcgtgccgccgtcggcaaaatactcgcagatgcgcttttgcagcatggcgagcgtgaggcccgtcgtgttgatgacgaagtccgcgcgctcgcgcacgggggcgagcagctcgctctcgcggcgcacggcctcgggcagagagcagccgctctcggcctgcagcgggtgcggccggcgcgactccttgtagcggcgcacgatggcgctctccgacgcctcgacgaacagaatgcggtagtgcacgcccatgctcttaagctccccgagcgcggcaaacagctcggaaaagctctcctggctgcggatgtccgtcacgagcgcgaccttttcataccgtccgcgcgtggcaaggcacagctcggcaaacttcgtcagcagtgccgtgggcatattgtccacacagtaaaagtccagatcctccagcacgtcggccgcgcggctcttgccgccgccggacaggcccgatacgatcagaaattccatcccgtcacccccggatgatcttcacttccggctcaagctccacgccggacgtgcgcagcacctcgctgcgaatgtggtccatgagccgcagcacatcgtcaaacgtggccccgccgcggttgacgacgaagcccgcgtgcttttcactcacctgcgcgccgccgacggcatagcccttgaggccggccgcgtcgatgagcgcagcggcgtagccccccgcggggcgcttgaacgtgctgcccgcgctcggcaggtcgagcggctggcggctgcggcggcgctcgctcaggtcgagcatgcgcgcccggatctccgccgggtcgcccggcgtgagcgcgagcgtgctgccgagcacgacgcagtccgtgtcggaaaacacgctgtgccggtagccgaaatcatgcgccgcgccctctgcctcgcacaggttcaggtcatggtcaagatagcgcgtggagacgacgacgtccttcatctcgccgccgtaagcgcccgcgttcatcgacaccgcgccgcccagcgagccggggatgccgtgggcaaattccagccccgcgagcccatagcccagcgccgcctgcgccagccgcgcgagcgggatgcccgcgcccgcgcgcaggtgcgtcgcgtcggtgcgcgccacgtccgccatgcgctcgcccatctgcacgacgatgcggtcaacatcgccgtcggtgatcagcaggttcgtgccgttgccgatgaggagcggctgcgcgccgccgccgcgcacgatgcggcagacggccgccgtctcctccgcggacgcggggcgcacgagcgcgcgcgccggcccgccgatgcgaaacgagcagtgcgcgcgcatcggttcgtattccaaaagctccagctccggcagctgctcgcgcagcgcgcggacgatggggtcgagattcgtcataacttcctgttcctttccgggtcagaacccgatgccgaggtcgatgctgcggtcgtgctcgtcggcgagcttctgcgccgcgttgtagcccatgcccttctggcggttgttcatggcggcgagctcgaggatgaccgcgaggttgcgtcccggcccgaccgggatcgtcacgcacggcacgcgcacgttgaggatctcgcagtattccgtcgtcaggcccagccggtcataggcccggccgtcctcccacggctcgagctgcacgacgagatccacgcgcgtctcgggcttgaccgcgccgacgccgtagatctgccgcgcgtcgatcacgccgatgccgcgcagctccatgtagtagcggatcatctcgggcgcggagcccatgagcgtcgtgcggttgatgcgcttgatctccacggcgtcgtccgcgacgaggcggtggccgcgcttgatgagctcgagcgccgtctcgctcttgcccacgccgctatcgcccgtgatgagcacgccctcgccgaacacctcgacgagcacgccgtgctgcgtcagacgcggggcgagatagctcgagagcgcggcgatgaggtcggccatgaactccgacgtgtccttgcgcacgagaaagaggttgcggtcgtacttttcggccatctccagacactcgggaaacggatccatcccgtggcagatgacgaggccgatgatgttgtagcgcatgaactgctcaaagcgttcgcgccgctggtcgggggtcagcgtctcgagatacgtgctctcgacgcggccgatgatctgcatccgttcggggtcgaagtagttgtaaaacccggcgagctgcagccccgggcggttgacgtcggcggtgcggatctcgcgcgtggcgtagtcctgggccgcgtgcaggacggtcagcccctgctcggcagcgatcttttgcagcgcgacggtataatgcggtgcgcccatcgtgcgcgcctcctttccggtaaagccgccggtgcggcggcgaagttgtttcgtccgggcggagcacctgctcccccgcttcccattgtacccaaagcggcggcgtttggcaacggcttttgcagcgtgccaggcattttttccggccgcggaacggaaaatgcgcagaaaatgtgaaaatcatcttgcaatcggccggggtttctgctattatgagaaagctgttctcgcagacaatagagaaggaggtgcttcaaccaatggcaaaatgtcagttttgcgacaagggcttgagcttcggcatcaaagtgagccactctcaccgccgctcgaaccgcacttggaaacccaatgtgaagcgcgtcaaggccatcgtggacggcaaaccccagcacgtctacgcatgcacccgctgcctccgcagcggcaaggtcacccgcgctgtgtgaattgcaatgattgcaccgaacaaggctcgcccgattgggcgagcctttttcgcatattcgggcattgattttgcagctttgcgcggggatgcgcgctgctgcttgccaagagaatggtctcatttcaaagccatttgcgccgcaggggagcccgagggggcaaggcccgcctcggatgagatccggcatcgcctttggcaacgccttctcctcacgaagcgaatggcgcaccatcccaagagcgtctgagccgcaggggagcccgagggggcaaggcccgcctcggatgagatccggcatcgcctttggcaatgcccccgtcacgcctccagctcccccgcgccgcgggtcacatcgtggatccacctgccggagcgcagccgcgggaaacacaaaaagatctgcacgatcacatcgatcgacatgagcgggtacacataccggatgtcgagcttccacaccagcgccgcgagcgccgccagcggcaggcacacggcgtacagcggcccgacatcgcacagcatcgcatagcgcacgtcgccgccgccgcgcagcacgccgacgatgttcgtcaggctcacgctcgacaccggctgcacgagcatcaagatccccatcatatacatcgcaatgtcgcacgcttcgccctccatgtgcatcagcggcaggatgtacggccgcagcagcacattgcgcacgagcgcgatgatgcccatgcacacgaatccgacgacgagcgccagagcgtcgagcacccacgccttgcgctgcacgctgccgcggttgccgcggccgatctcccgcccgatgagcacggcggccgcgccgcccgcggcgaacgacgccggggtcatcatgcgctgcaggttcccggcgatggtgtaggccgagaggatgggcgtgttgtccgccatatgccccatgatgaccgtgtagagcgaaaacgcgagcgaccacaggcactcgttgcacacgacgggcagggcgtatttggcgaagtcctttgcgatcacgcggccggggtgcagcagcgcgcgcggcatgagcggcagccggcggctgacggcggcatacacgcacagcaccgcgacctcgaacgcgcggctgatgagcgtggcgacggccgcgcccgcgcagccgagcatgggcgcgccgagcttgccgtagatgagcacccagttgaggaagatgttcagcgcgccggacacggtgagcagcacggcgccgaggcggggattttccgtgctgcgctgggcggcgatgtacacgccgctgatggcggagaagaaatacgaaaagccgacgtagcgcgtgtacgccgcgccgggcgcgacgaggtcggcattgttggtgagcacgcgcatgatctgctccgggatgcagaacgccgtgatggcgagcaggcccgtgatcgtcgtggacacgaacagcgcgatgcccatcacgcggttgatggcctcctgatcgccgcggccgtggtactgcgccacgagcacgctcatgccgctctgcacgccgaagatcatcagctgcatgacgtaaaacggactgttggccatcgtcacggcggcgagcgccgtctcgccgagcacgccgaccatgaacgtgtcggccatggacatggaaaacgtcacaaaattttgcaagatcatcgggagcatgagcaaaacggcctcccggatgaaggttttttcctcgcggatgagacgcatggggctacctcctttgcgcagtctgtttatcataccatgatttcccgccgcgcgcaaccgtgcggcccgtttccgccgccggtcattgacacccgccgccctttgcgctaaaataacgctgttgtgcccccgtagctcagttggatagagcggccgcctcctaaggttgcgttacaacggccacctcaaaaaaaactaaataagggattgcagttcgactttgatcgggctataatcatatatcagacacgtccatatagctcagctggatagagcacacgcctcctaagcgtggggtcggaggttcaaatcctcttatggacgccagtgaacaacgccgaaagcctttgttttcaagggttttcggcttttcttatataaaaagctacg

SEQ ID NO: 13964 - DNA, 190951 bp, Unknown
  gut microbiota DNA sequence
ctgtccggtgtctgtttttgcccttgaattttgacaacacttttgacaacagtttgcgtttcaaaacgttccagagcgcgccgaaagggaaacgaaaaaaccgttgaaaaatcaaggttttcttgaaatttcaacggtttctttttggtgctccagcggggattcgaaccccggacaccctgcttaaaaggcaggtgctctgcctactgagctactggggcatatcggtgtaaaaagttatctgctatcccaaactatcagacgcgaatccagcgcagcaattcgcggctgaggaaggaagatgttttcagaggcgaaggctttccgcctgcgggaagccgaaaccggcagaaaacatctgacgtggctgggatggcgggattcgaacccacgatatcagagtcaaagtctggtgtgttaccattacactacatcccaatatcggggcaaaaacaacggggatcgggatcactcccaatccccgatttcgtggggtgggtaaaggggttcgaaccctcgacacccggaaccacaatccggtgctctcccgactgagctatacccaccatagatctgaaatggtacgccaagagggattcgaacccccggcctactgcttagaaggcagttgctctatccaactgagctattggcgcgcatacaatattttgctgcccgcccagaaggtatggagcgggtgatgggaatcgaacccacgtatccagcttggaaggctggtgttctaccattgaactacacccgcagaggtcgtcccacattcagctttacgaatataccatccctgcgcggtgtttgtcaagcaaaacctgttcaaaatgcgaaaaaatcgcaaaccgggggacggcgcaggccgtccccgcggatatttcagcggtgaaagagcttcttggtctggaagcgcggctcgaacgtgatgttcacctcgagctttttgaacacgttttcgtccacgtgcgagaggatgacggacgagtgcgcctcgcagtgcgcgagcttttcgagctgttgcatggcgatctcggcggtcgggtcgctcacggcgcagatgctcagcgccacgagcacctcgtcggtgtgcaggcgcgggttgtggttgcccagatgctcgaccttcaggtgctggatcggctcgatgatctcgggcgagatgagcgtgacgtccttcgggatgccgccgaggtatttgagcgcgttgagcaggcaggccgagctcgcgccgagcagggaagaggtcttgccggtgatgatcgtgccgtcgggcatctcgatggcgacggcgggggcgccggtctcctcggcgcgccggagtgccgcgcccacgaccgggcggtcggccgccgtcaggccgagctggttgagcagcagctcctgccgctgcgtctcgaccggggcgcacaggccgcgcagctgcgcgcaggcggtggcgtagtagcggcggaggatctcctgcctggcggcggcgcagcacacggcgtcgtcgctgatgcagtagcccgccatgttcacgcccatatccgtggggctcttgtacggcgagctgccgtagatgcgctggaacatggcgttgagcacggggaagatctccacgtcgcggttgtagttgacggtcgtcacgccgtaggcctcgaggtggaaggggtcgatcatgttcacgtcgtcgaggtcgacggtcgcggcctcgtaggcgaggttcacggggtggcgcagcggcaggttccagatcgggaacgtctcaaacttggcgtagcccgcgcacacgccgcgcttgtgctcatgatagagctggctcaggcacgtggccatcttgccgctgccggggccgggcgcggtcacgacgatgaggctgcgcgtcgtctcgatgtagtcgttgcggccgaagccgtcgtcgctgacgatgcgcgcgacgtcggacgggtagtccgggatgatgtagtgccggtacacgcggatgccgagcgtctcgagccggcgctggaacttttccgccgcgggctggccgcggtggtgcgtgatgacgacgctgccgacgtacagcccgcagccctggaatgcgtcgatcaggcgcagggtgtcgtcgtcgtaggtgatgccgaggtcgccgcggcgcttgttgcgctcgatatcatccgccgagatggcgatgatgatctccgcctcgtcgcgcatctccatgagcatgcgcaccttgctgtcgggggcaaagcccggcagcacgcgcgatgcgtggtagtcgtcaaagagtttgccgccgaactccagatacagcttgccgccgaactggccgatgcgctcgcggatcttttccgactgcatccgaaggtatttgtcgttgtcaaagccgatcgcctgcatagatgtttctctcctctgtttcaagctatcaaacaaacatatattctacagcattcgacgcattccggcaatgggaaaatgcccgatccggtaaaaatttatcgcagggccgattcactctttttttattcataaatgtatggtataatcctaaattacactggacaaggagtgtcaacaaatgggctttctcaaaaaaatatttggtactcacagcgaccatgagctcaagcggctctacccgatcgctgataaaatcgaagccatgtcggacgagtacgccgcgctcacggacgagcagctgcgcgccaagaccgacgagttcaagcagcgctacgccgacggcgagtcgctcgacgacctgctgccggaggcgtttgccacggcgcgcgaggccgcatggcgcgtgctgggcatgaagccgttccgcgtgcagctcatcggcggcatcgtgctgcatcagggccgcatcgccgagatgaagaccggcgaaggcaagaccctcgtcgccgtcctgccggcgtacctcaacgcgctcaccggcgagggcgtgcacatcgtcaccgtcaacgattatctcgcccgccgtgacagcgagtggatgggcaaggtctaccgcttccttggcctgagcgtcggcctgattgtgcacgacatgtcgagcgccgagcgccagcaggcctatgcggccgacgtcacctacggcacgaacaacgagatgggctttgactacctgcgcgacaacatggccatctacaaatcccagatggtgcagcgcggccacgctttcgccatcgtcgacgaggtggactccatcctcattgatgaggcgcgcaccccgctcatcatctccggccagggcgacgagagcaccgacctctaccgccaggcggaggactttgccgcccgcctgacgtgcaagtcctacgcctccatcgacgacaaggaagaggaggacgaggacctcgacgccgactacgtcgtcgacgaaaaggcccgcaccgcgacgctcaccgcccgcggcatcgccaaggccgagacggccttcggcctggaaaatctcgcggacatcgaaaacgccacgctcgtgcaccacatcgaccaggccatccgcgcgcacggcatcatgaagcgcgacattgactacgtcgtcaaggacggcgaggtcatcatcgtcgacgagttcaccggccgtctcatgctcggccgccgctacagcgacggcctgcaccaggccatcgaggccaaggagcacgtgcgcgtgcagagcgagaacaagacgctggcgaccatcacgttccagaactacttccgtctctacggcaagctctccggcatgaccggcacggccatgaccgaggaagaggagttcgcggccatctataacctcgacatcatcgagatcccgacgaacaagcccgtcatccgcatcgacaaccccgacgttgtgtataaaaacgaggccggcaagctgcgcgccatcatcgagcagatccgcgtctgccatgaaaagggccagccggtgctggtcggcacggtgtcgatcgaaaagagcgagcacctgtccaagctcctgcgcaaggcgggcatcccgcacaacgtcctcaacgccaagcaccacgagaaagaggccgagatcgtcgcgcaggccggtaagttcggcgctgtcacgatcgcaacgaacatggccggccgcggcacggacatcatgctcggcggcaacgcggagtatctggccaaggccgacctgcgcaaggccggcttctcggaggaggtcatcgccgaggccaccggctatgccgagaccgaggacgaagagatcctcaaggcccgcgtcctgtttgccgagcgcatggccgagcacaaaaagagcatcgatgaggaagcggaccgcgtgcgcgcggccggcggcctgtatatcatcggcaccgagcggcacgagtcccgccgcatcgacaaccagctgcgcggccgctccggccgtcagggcgaccccggcgagagccgcttttacatcgcgctcacggacgacgtcatgcgcctgtttggctccgagcgtatgcagagcatgatggagacgctgcgcgtcgacgaggacacgccgctcgaccacaagatgctctccaacgccatcgagcaggcccagcgcacggtcgagagccgcaacttccaggcccgtaagaacgtgctcgaatacgacgatgtcatgaacgtgcagcgcaacgttatctatgaagagcgccgcaaggtgctcgacggcgaggacctgcaggagcacgtccagcacatgatccgcaccgtcatcaccggcgacattgctgccggcatggccgagcaccaccccgaaaacgacaaggatctgcacgagatcctcaccccgctcgaaaagctctttccgtgcgacctgagctatacggccgaggaactgcacaagctcacgcccgacacgctctccgacgcggtgtatgactgcgccatgaaggcctatgccgcgcgcgaggaagccttcggcctgcagccggacggcacgccgctcatgcgcgagctcgagcgcgtggtcatgctgcgcgtggtcgacgaatactggatggatcacctcgaggccatggatgacctgcgtcagggcatcggtctgcgcgcctacggcaacgtcaagcccgtcgatgaatacaagcgcgccggctttgacatgttcgacgaaatggtcaacggcatccagagcgagacggtgcgccgcctgttcacggtgcgcgtgcgccgcgagcagaagctcgagcgcaagaccgtcgcccgcagcgccgcgacgaatgccggcggggacgacagcgagaagaagcgccccgtccgccgcgtcaagaagcccggccgcaacgacccgtgcccgtgcggcaagctgcgcccgaacggcctgcccatgaagtataaggactgctgcggcaagaatgcataacgaagtcgctttcccgctgcacgctgagcgcggcgcagcttacctgaccgcgccgaacatcgcggcgtgccacgccttttccacccgcctcggcggcgtgagcaccggcgtgctcgagagcctgaacctcagtgtccgccgcggcgacacgccggaaaacgtgcgcgaaaactggcggcggctcggcgcggccgccgggctggatctcacacgcgcggtgtatgcgcggcagatccacagcgcggacgtgcgcatcgcgcacgccgccgacgcgcagccgccggagctggagccccgctttacctgcgacggctttgtcacgaacgaaccgggcgtcccgctcgcggtctttatggccgactgcctgcctgtgctgctgcacgaccccatcgccggggtcatcggcgcggtgcactgcggctggcgcggctcggtggccgatatcctcggcgctgccgtcgcgcagatgtgcgccctcggcgcgcacccggcggacatccgcgccgccatcggccccggcatcggcgcgtgctgcttcgaggtcgggccagaggtcgtctctgcggccgaggcgctgctgcatgcgccgctcggcgcgctcgcgcgcccgcgcgcggacggcaaggtcctgctcgatctcaagggcgtcaacgcccggagacttgtgcagctcggcgtcccggcggggcagatcgccgtgtcggacgcctgcaccatgtgccggccggacgtgttctggtcgcaccgcgcgacggacggccgccgcggcgtgcaggccgccgtcatcaccctgtgacccaagggggaacaccatgaaacatttgcacctgacccgcgtgctcgcgttcgcgctcgcacttgtgctgctgctcggctgcacggcctgcggcaagaagaccacggacgacaccggcgacaccgtcggccagaaggacacgcagaccaccgtcgagctcgacggcaagttcacgctcaactacagcgcgtccgccggcatgaacccctacaagacgcaaaattccgataacctcgccgtctgcggcctcgtgtacgagacgctcacggagctcaccgatgccttcgaggccgagcccggcctgttcaccgagtggagcagcgacgacggggagacctggaccttcaccgtcgcggccggccgcaccttccacgacggccacgcgctcacggcgcaggacgcggcctattccattcagaccgccatggcgtcggatctgtattccggccgcctgaacgccgtcaaggacgtcaaggacagcgacgacggcaccgtcacggtcacgctcgcgcgcgcgaacacgcagtttcccgcgctgctgaacatcccggtcatcgaaaacaacgcggccgacagcacctaccccagcggcacggggctgtatcagtttgcgtccgatcaccagagcctcacggtctattccggccacccggacgcggacaaagcgcccgtcgacacggtctatctcatggagtgcaagtcggtcgaggagatcgtctccgcgtttgacaacggccagctcgatctcgcgctcagtgaccccagctccggcacggacctgagcttttcgagcctgaacgaccagcgccagtacgccacgacgaacctgcagtatgtcggcttcaacaccaacagcagctttttcatgacggcgcgctaccgccagccgttcaattacgtcatcgaccgcgcgtttgccgtcgcgctgctgcacgactgcgccgtcgccaccgcgctgcccgtccatccggcgagcacgctctatgacaatgccctcaacgagtcgctgtcctatgacctggataaggcaaagaagctgtttgacgacctgaagatcgtcgattatgacggcgacggtgagcgcgagtacatgcccgacgggcagtccccgctcgacatcagtctctcgctgatcgtctatgccgacagcacgaccaaggtcagcatggccaacaagattgcggccgacctcacgagcatcggcatccctgtgaaggtgcgggagctcagctgggacaattatcaggatgcgctcaagggcggcaagtttgatatgtactacggcgaggtcgccctcccggcggacttcgatctctcggcgctgctcaaggccggtggctcgctcaattacggcggcatcacgaccggcacgtatgccgatgtcatcaacgcctacctcgccgccgcagattccgaccgcgcagcggcctgcggcaccatgctccagaccatctcggacactgcgcccatcgtgcccgtctgctttgaaaagcactgcctgtacgtgcaccgcggcgccgtcggcggcttttctcccacgaagtacaacattttccacaacatcacggattggaagatcaataacgcatgaaacaagagtggattgcgcgcgccaagcgctttgccacctatgcgctcgtcggctgctttgacacgggcatggactgggtggcgttcacaactgcacatgagctgctgcacttcacgcccgtgatctgccaggccatcggctactttgtcggcacggtctgcagctattttctcaacggccgcatcaccttccgcgacgggcacatcgcccgctggcggcagtgcctgcgctttgtgatgtggaacgtggtgtccctcggcgtgagcgaggtgatgatcggcctgctgacgcacttcggcctcaacccgtacatcgccaaggtcggcgtcacgctcgaggtcgcgctgttcaactacttcggctataaatatattgtgttcgcagtccccaaacaaacggaaggagagcaggatcatgacagatcgtcaactgattaatctggccgagcaggcctcccgcaatgcctatgtgccgtattcccatttcgccgtcggcgcggcgctcgagtgccgcgacggcacggtctttaccggctgcaacattgaaaacgccgccctcggcagcaccatctgcgccgagcgcaccgccgcctgcaaggccgtcagcgagggccgccgcgactttgtgcgcatcgccgtctacggcgacggcgagcactattgctacccctgcggcgcgtgccggcagtttctggccgagttcgcgcccgatatggaggtgctgtccgccatgggcggcggccgctatgtcagcaaccgcctgagcgagctcatgccctatacctttaattattaagggatccgctatggaactggaacagctgcgcattttctgcaccgttgccgcctgccgcagttttacccgcgcggccggtcagctcttcgtcagccactcgacgaccagccgcgccgtgtccgccctcgagcgggagctcggcgtgccgctgctcgtgcgcgaccggcacaccgtcgcgctcacgcccgccgggcagacgctcctgaccggggcggaggacctgctccggcaggccgatgcgcttgcggccgccgtgcacaccgcggcggaggcggccccggagccgcccgaaccgccggaggcgtaattttggcggactgcacaaacttttttgcaaaatttctacgtttgagcgaaaaaccctcttgacattcgggagggtttttgctattcttatgaagcgcctgtgcggaaacaggtgcattctgcgatgaagcgggagattgcggagcccgtctccggtaacttccgtggagtatgtccgctgccgcgcccttgcacggcagatgatcgggcggttgagtcagccagcacttgcgtatatcacctgcgcggctgtataccggcgagagccggtttgtttttcgggcagggtttgatacgcacggaacggtgtatggcgatctcatccgtgcgaaccaggcggagccaatgccgccaaaaaaattcgtaacggaggaaacaacatggcaaccacgagcaacaagaaaatgatccgtatccgcctcaaggcctacgatcaccagctgatcgacaaggcggcggagaagatcgtcgaaaccgcaaagcgtaccgacgcgaaggtctccggccccattccgctgccgacgaagaccgagatcgtcaccatcctgcgcgctgttcataagtataaggacagccgcgagcagtttgagcgccgcacccacaagcgcctgatcgacatcatgaacccgacccagaagacggtcgaggctctgatgaatctggagctgccggccggtgtcgagatcgacatcaagctgtaagcacaccccgttaaccctgcgcgcgagcgcatatttacaaacccgcagtccgcagcttgcgtgtgcggacgggtcaagtcagcagcctctggccatgagctaagcgagctgaccaataacctgaaggaggaacatgtatgaaaacagccatcatcggtaaaaaggtcggcatgacgcagatcttcgatgaagcaggcaaggtcgtccccgtcaccgtgatcgaggcaggcccctgcacggtcaccggcaagatgaccaaggaaaaggaaggctatgaagccgtccagctcggctacgaggacgtcgccgagaagaagctgaccaagcccgagaagggccacctggataaggcgggcgtcggctacaagaagcatctcaaagagttccgtctcgaggactgcgcttctgtcaatgtgggcgatgtcgtcaaggccgacaccttcaaggaaggcgacaaggtcgacatcaccggcatcagcaagggccacggctacgccggcgtcatcaagcgcttcggccagggccgtaccccgaccagccacggcggcggccctgtgcaccgtcacgccggctccatgggctcgagcaccgatccttcccgtatcttcccgggtaagaagcaggccggccacatgggcgtggatcaggtcaccgtccagaacctcgacgtggtcaaggtcgatcccgagctcaacatgatcgttgtgcgcggcgcgatccccggcccgaagggcggcattgtctatatcaagagcaccgtcaagaagaccgtcgtcaagaagggcgacgccggcatcagcaccaacccgcagaaggcctccggtcgtaacccgcagaaggcttctgcaagaaagtaaggaaaggagagagcgaatatgcctactgctaagttgtttaatatggccggcgatcaggtcggcgaagtggcgctctccgaagccgttttcggtgttgagcccaacgagtccgtcctgcacgactccgtgaagaaccacctggccaactgccgtcagggcacgcagagcgcgctgaccaagggcgaggtttcctactccaccgccaagccctggcgccagaagggcaccggccgcgcacgcgccggctacaagggcagcccggtgtggacccacggcggcgtcgcgtttgcgccgaagccgcgcgactacagctacacgctcaacaagaaggtcaagagactggccctcaagagcgcgctgagcgccaaggccgctgccggcgagatcctcgtcgtggacggcatggccgtcgaggagatcaagaccgcccccgtcaaggcgttcctgaccaagatcggcgccgacggcaaggctctgctcgtgaccgagcaggtcgacgagaagctcgtcaagagctcccgcaacatccccggcgtgagcagcaccatcgccaccatcctcagcccctatatgatcctgacgcaccgcgtcctggtcgttgacaaggctgcgctccagaaaatcgaggaggtgtacgcataatgagaaccgcttacgatgtcattatccgtcccatcatcaccgagcagtccatggaagacctcgacatcaaaaagtacacgttcgaagtcgccaaggacgccggcaagatcgagatcaaaaaggccatcgaggagatctttgacgtgaaggtcatcaaggtcaccaccgcgacgatccgtgccaaggagaagcgcgtcggcgccaatccctccggcatgaccgccaccggcaagaaggccgttgtgaaactgtccgctgattcgaagaacatcgagatcttcgagggcatggtgtaagggaggaattgaacaatgtcgattaaaacctataaacccaccacgccttcccgcagacatatgtccgtttccggcttcgacggtgtcgataagcacgccaagccgcagaaggagctcgtggaggtcctcaagaagcactccggccgcaacagctacggccgcatcaccgtccgccatcagggcggcggcaaccgcaaaaagtaccgcgtcatcgacttcaagcgcgacaagatggacgtgcctgctaccgtcctgcgcctggagtacgatccgaaccgcagcgcttatatcgccctggtcgagtacaccgacggcgagcgccgctacattctggcccctgtcggcctgaacgtgggcgacaccgtcctgtcctccgccgcggcggacatcaagccgggcaacgccctgccgctggccaacatcccggtcggcaccgttatccacaacatcgagctctaccccggcaagggcgcgcagctggtccgctccgcgggcgtcgccgcgcagctcatggcgaaggaaaacggcatggctaccgtccgtctcccctccggcgagtaccgcaaggtccgcctcaactgcatcgcctgcatcggccaggtcggcaatgttgaccatgccaacatcgccgtcggcaaggccggccgcaaacgccacatgggcatccgcccgactgtccgcggttctgtcatgaacccgtgcgaccacccgcacggcggcggcgaaggcaaagcgcctgtcggccgtcccggcccggtcaccccgtggggcaagccggcgatgggttacaagacccgcaagaagaagaatgcgaccgacaagttcattgtcaagcgccgcaacgcgaagtaaggagggaataggtaatgagcagaagtgttaagaaaggcccgtttgccgctcccgagctgctgaagcgggtcgatgaaatgaacaaggccggcgagaagaaggtcatcaagacctggagccgttcctccacgatcttcccgtcctttgtcggccacaccatcgctgtccatgacggccgccgtcacgttccggtctatgtgaccgaggacatggtcggacataagctgggcgagttcgcgcccacgcgcacgttccgcggccacgccggcagcaagactgttggaaagtaagggggagagaacatggaagaactgaaaactgcacgtgcccagctggtgcacgcccgtatcgctccccgtaaggtccagatcgtctgcgacatgatccgcggcaaggacaccaaggtcgccgaggcctatatggccaacacgccgaaggccggctgtgagctcatgctcaagctcctcaagagcgcctgcgccaacgcggagaacaacttcgagatggatccggacaacctctacgttgccgaggcctatgccacggccggcccgatcctcaagcgcggccgcccgagagctcagggccgtatgtaccgcatcaacaagcgcaccagccacatcaccatcgtcgtggctgagaaggcataagggaggaggcagaagatatgggacagaaagttaatccgcacggcatgcgtgtcggcgtcatcaaagattgggattcccgctggtatgcccgtgacgagaaggtcggcgacctgatcgttgaggactacaagatccgccagtacctgaagaagaccctgtattccgcaggcatcccgaacatcgagatcgagcgcgacagcgcgaaggtccgcatctatatccactgctctcgtccgggcgttgtcatcggcaagggcggcgcggagatcgagcgcatccgcctctccgtcgagaagatgatcggcaagccggtcgccctctccatcgtcgaggtccgcacgccggatacgaacgcacagctcgtcgccgagaacatcgccgcgcagctcgagaagcgcatcggcttccgccgcgcgatgaaaaacgccatgggccgcgccatgagaatgggcgcccgcggcatcaagatcatgtgctccggccgtctgggcggcgccgagatcgcccgcaccgagtgctaccacgagggcaccattccgctgcagaccatccgcgcggacatcgagtacggcttcgctgaggctgccacgacctacggccgtgtcggcgtcaaggtctggatctacaaaggcgagatcctctcccagagcctgcgcaccaccccgcgcaccatggatctgaacaagcgcgacgaccgtcgccgtgaccgccgtgacggcgatcgcagaggccgcggcggctacaaccgcgaccgtcgtgacggcaaccgccagggcggccgtccgggctaccagggcggcggacgtccgcagggcggcaaccgtccgcagggcggctacaaccgcggcccgcgtccggcagctcccgctgctccgaaggaaggaggcaacaactaatgctgatgccgaaaagagtgaagtaccgcagagtgcagcgcggtcgtatgaccggcaaggccctgcgcggcaataaggtgacctatggtgagttcggcctgcaggcgcaggagccggcctggatcacctccaaccagatcgaggcggcccgtgtcgccatgacccgttacaccaagcgtggcggtcaggtctggatcaagatcttccccgacaagccggtcacgcagaagccggccgagacccgcatgggttccggtaaaggttctcctgagtactgggtcgccgtcgtgaagcccggcagagttctgtttgagatcgctggcgtgccggaagaggctgcccgtgaggcgctgcgtctggccagccacaagcttccctgcaagacgaagatcgtcaagaaggaagacactgagattggtggtgaataagatgaaagctagtgaaattcgctccatgtccgccgctgagctggaaagcaagctggtcgaactgaagaaggacctgttcatgctccgtatgcagcacgctaccaatcatcttgacaaccccgttaagatttccgctgtgcgtcgcgacattgcccgagtcaaaaccgtgctccgcgaaaagcagctcgagcagtgaggaggtaagtgagaatgaacgaaatgagaacgacttcccgcaagacccgcgtcggcaaagtggtgtccgacaagatggacaagacgatcgttgtcatcgtggaagaccacgtggcgcacaaagtctataaaaagatcatcggcaagacctaccgcctgaaggcacacgacgagaacaacgagtgccatgttggcgatatcgtccgcgtgatggagacccgccccctgtccaaggacaagagatggcgcgtggtcgagatcgtggaaaaggcgaagtaaggaggcaacaacatgattcagcaggaaagttatctgaaggttgccgacaataccggcgccaaggaaatcaagtgcatccgcgttctcggcggatccaagcgtaaatacgccagcatcggcgacgtgatcgttgcttccgtgcgcaaggcggcccccggcggctcggtcaagaagggcgacgtcgtcaaggctgttgttgtccgcaccgtgaagccggtccgccgcgcggacggcacctatgtgcgtttcgatgagaacgccgccgtcctgatcaacggcgaggataagaacccccgcggcacccgtatctttgggcccgtcgcccgtgagctccgcgacagtgacttcacgaagatcctgtctctggctcccgaagttatttgaggagggcgcagaacatgaacatcaaaaaagacgataaagtcgttgtcctgtccggcaaggacaagggcaaggaaggcaaagtcctgtctgctgacccgaagggcggcaagctcatcgtggagggcgtgaacgtcgccacgaagcaccagaagccgaaaaatcagcaggatcagggcggcatcatcaagaccgaaaccccgatctatgcctgcaaggtcatggtcgtctgcccgaagtgcggcaagccgacccgcattgcgcacaagatcaccgacggcaagaaagtccgcgtctgcaagaagtgcggcgccgaactgtaaaggagggagcaacgaactatggcaaatatgccttctatgaagaagaagtatgtggaggaagtcgctcccgctctgatgacgaagttccagtacgagagcgttatgcagatcccgaagatcgagaagatcgtcgtcagcgtcggctgcggcgactgcaaggataacgccaaggcgctcgacgccgtcatcaaggacatcactgcgatcaccggccagcatgcggttgcgaccgtcgccaagaagagcgtcgcaaacttcaagctgcgtgagggtatgcacgtcggcgtgaaggtcacgctgcgtcaggaccgtatgtgggagttcctggatcgcctgttcaacatcgcgctgcctcgtgtccgcgacttccgcggcatctcggccgatgcgttcgacggccgcggcaactacagcctcggcctcaaggagcagatcatcttccccgagatcgagtacgataagatcgagaagctccgcggcatgaacatcgccatcatcaccaccgccaagaccgatgaggaagcacgcgagctgctcaagctcatgggcgccccgttcgtcaccaaagcataagggaggagcgacacaatggctaagaaatctatgatcctcaagcagcaggcgcccgcgaagtactccacccgtcagtacaaccgctgcaagatctgcggccgtccccacgcttacctgcgcaactacggcatctgccgtatctgcttccgtgagctggcgtacaagggtcagatccccggcgtccgcaaagccagctggtaaaattctgccgtttggcattgtgagctgtgcttgctgtataccagatacagctgcgcacagcgcccttcgccaaccaacagaatttcgcccggggcgggataacggctgcgcggtgcacaccgcctgacgaaaaatttccgcccagcgctgaaccctcgcgttcagccccaacttctgtaagttcgccccgcgcagccgcagctggatctgcggctgccggtgcgcactgaaatacggtgccggtccttatgatctgagttccggtgccgcgccccgcccatgcctgtgcgtttgacccggcgcgcatgcatggctcaccgcttttgtgccgcccggcaccgcggccgtgccgccgcctccggcggcgacatgaaaatggaccgcgcgtcacgaaagcaagcttttgccccttcgcagaaagggcagggatgacgaaaggccgcagggaatcaagcattcatgcggaacctcgccgcccaaaccgtatcatcggtaacttctaactaaggaggaaacacaaatgcagatcaccgatcccatcgccgatatgctgacccgcatccgcaacgctggcagcgctcggcacgaaaccgtggacgtcccgaattccaagatgaagaaggccatcgccgaaattcttctcgaggaaggctacatcaagagcttccagctcattgatgacggcacccagggcgtcatccgcatcaccctgaagtatctccccggcaaagagaaggccatccagggcctccgcagagtctccaagcccggcctgcgtgtctacgccggcgctgacgagctgccgcaggtcctgcgcggcctcggcatcgcgatcatctccacctcgaagggcatcatgaccgacaagaaagcgcgtgcgcagcacgtcggcggcgaagtcctcgcgttcgtgtggtaagggaggtacagaacaatgtctagaattggtagagctcccattgagatccccgcaggcgttgaagtcacctgcaatggcaacgttgtcaccgtcaagggcccgaagggcaccctgtcgcacaacgtgcacccggacatgaccgtcacggtcgaaggcaacaccatccatgtcacccgcccgagcgatgacaaattgcaccgctccctgcacggcctgacccgcacgctgatccacaacatggtcatcggcgtgaccgagggcttcagcaagacgctcgagatcaacggcgtcggctacagagccgtgaaggaaggtcagaacctggttatgcacctgggcttctcgcacacggtcaccgtgtccgagaacgcggacatccagatcgatgtcccgaacccgaaccaggtcattatcaagggtatcgacaaggaaaaggtcggccagtttgcagcagaagtgcgcgcgaagcgtccgcccgagccgtacaagggcaagggcatcaagtacgattacgagcatatccgccgcaaagaaggcaagaccggcgcgaagtaattggaggtgtgcctgaatgattaagagaccgaatacgaaagcgcagcgcgttcgccgtcaccagagagtgcgcggcaagatctccggcacggccgagagaccgcgtctgagcgtgttccgcagcgaaaacaacatttatgcccagatcatcgacgatgtcgccggtaagacgctctgcagcgcctccaccgtggaaaagggctttgaaggcaatggtggcaactgcgaagcggcagccaagatcggcaagctcatcggcgagcgcgccgtggcggccggcatcaccgaggtcgtgttcgaccgcggcggcaacgtgtaccatggccgcgtcaaggctctggcagaaggcgcccgcgagggcggcctgaagttctaacgggaggaggaaacgaaatggcatataacaatgacagacgggacaaccgccgcaaccgcagcgatgagccccaggaattcagcgaaaaagtcgttgccctcaaccgcgtttccaagaccgttaagggcggccgcgtcgcaaagttctccgcactggtcgtcgtcggcgacggcaagggccgcgtgggcttcggcctcggcaaagctgccgaagtttccgaagcgatccgcaagggcctggaggacgcgaagaagaacctgaccaccgtgaccctgcagggcacgacgatcccgcacgaggtcatcggcgagttcggcgccggccgcgtgctgctcaagcccgccgcacccggcaccggcgtgatcgccggcggcgccgtgcgtgctgtggtcgaggctgccggcatcaaggacatccgtaccaagtgcctgcgctcgaacaacccggcgaacgttgtcgccgcgacgatggaaggtctgaagtctctgcgcaacgcccagcaggtcgctgtttacagaggcaagaccgccgaagagattctgggttaaggaggggctgagacatggcaaatctgaagattaagctcgtcaagagcctcagcggccgcaatgccaagcacattgccaccgccaactccctcggcctgcacaagatcggcaacgagaccgtgcagcccgataacccgcagacccgcggcaagatcgccaagatcggctatctcgtcgccgtcactgaagaagaataaggagggcccccaaaatgaatatcaacgaactttctcccgttgtgggctccacccatgtcggcaagcgcaagggccgcggccacgcgaccggcaacggcaagaccgcaggccgcggtcataagggccagaaggcccgcagcggcggcggcgtccgcatcggcttcgaaggcggccagatgcctctggcccgccgcatcccgaagcgcggcttccacaacatctttgccaaaccgctcgagagcgtgaacgtctccgctctggagaagtttgaagacggcgctgtcgtcgacgcaaaggccctgctcgatgccggcatccttagcaagtgcacctacggtgtgaagatccttggcaacggcgaaatcaccaagaagctgactgtgaaggcttctgcgttctccgaatccgcgaaagcgaagatcgaggcagcaggaggaaaggctgaggtggtgtaaggtgctccagacatttcgtaacgcatggcgcattgaggaactgcgcaagaaaattctctttacgcttctgattgtcctgctttaccgtctcggcaatgccgtacccgtacctttcgtcgacaccaaagcactggccgactacttccaggctagtggcctgcagaacacgatcctgggcctgttcaacgtcatgtccggcggcgcgttctctcaggcgacgatcttcgcactgtccatccagccgtacatcaatgcttccatcatcattcagctcctgtgcattgcgatccccgctctggagcgtctgcagaaggaaggcggcgaggaaggcaagaagaagatcgccagcatcacccgctacagcacggtcgccatcggcctgctgcagggctttgcgtattatatgatgatgcgcaactacagcctcatcaacgcggactttgccagcaatgtctgggcagccatcgtcatcatcctgacctttacgtccggctccgccctcatcatgtggcttggtgagcagatcaccgagttcggcatcggcaacggtatctcgatcatcctgttcgtgagcatcgtcgcccgcttcccgaactccatcatccgccagatcaacaacgtcgccaatggcgacctcgcctggtgggtcctggtgctgatgtacctcggcgccctgctgctcatcgtgctcatcgtgctcgtcaacgacgccgagcgccgtctgccggtgcagtattccaagcgcgtggtcggccgcaagatgtacggcggccagagcacgcacctgccgatgaaggtgaacatgagcggcgtcctgccgatcatcttcgcccagtcgatcgcgtcgctgccggccaccatctgcgccttcgttccgaagtggcagaacggttgggtcatgaagcacatctttgatacgaccacctggccgtatatcgtcatctacttcctgctcatcatcttcttcagctacttctactccacgatccagttcaacccgatcgaggtcgccaacaacctgaagaagaacggtgggttcatcccgggcttccgtgcaggcaagccgacgagcgaattcatccagaaggtgctcaacaagatcacgctcttcggcgcgatctacctgagcgtcatcgcgatcacgccgctgatcgtcagcgcgtgctcgaaggcggagcagctcaccggtatttccctgggcggcacgtccatcatcatcgttgtcggtgttgcacttgagaccgtccgcgcactcgaggcgcagatgctcatgcgcaactacaagggcttcctgaactgataggaggatgcacacaatgaaacttgttttgttaggtgcccccggtgcgggcaagggtacgcaggctgagatcctcagccgcaagctgaatatccccaccatttccaccggcaacatcctgcgcgcggccatgaaaaacggcacgcccgtgggtctgaaagcaaaatcctacgtggaaagcggcaagctcgttccggacgacgtcatcatcggcatcgtctgcgagcgtctggctgagcccgactgcgccaatggttatatcctcgacggtatgccgcgcacgatcccccaggcggaagcgctggagcagcacggcatcgacgtcgacaccgccctctcgatcgagatcgcggacgagaccatcatcgagcgtatgtccggccgccggacctgcaaggactgcagcgccacgttccacatcgtctccaatcctcccaaggtggaaggcaagtgcgacttctgcggcggtgagctgaccatccgcaaggacgacgctcccgagaccgtgaaggcgcgcctggacgtctaccatgccgagaccgagccactcaaggacttctatgcccagcgcggcaagctcgtcaaggtcgataaccagccgaccatcgaggccacgaccgctgcgatcgagaaagctctgggtctggaatgattatcatcaaatccgatcctgaagtggatctcatgcggcaggccggccggatcaccgctggcgcgcgtaccgtcgcgcgtcagatggtggagccgggtgtgaccacccgccagatcaaccgcgaagtgcacaagttcatcacaaagtccggcgcgtcgccgtgcttcatgaccgacggcggcttcccgacggcggcatgcatctccgtcaatgacgagatcatccacggcatccccggcgaccgcgtcctgcatgagggcgatatcgtcagcgtcgacgtcggcgcccgctaccgcggcttcaacggcgactgcgcgggcacgttcccgtgcggcaagtgctcggatgaggccctgcgcctgatccgcatcacgcgccagagctttttcgagggcatccaatttgcccgcgtcggctaccgcatctccgacatcggccacgccgttcaggagtacgccgagagctatggctattcgctcgtgcgcgagtatgtcggccatggtgtcggcgccagcctgcacgaggcgcccgagatcccgaactacggcaagcccggccacggcccgcgtctgcagaagaacatgacgatcgccgtggagccgatggtcaacgtcggcgggtacgaggtccgtgttctggacaacggctggaccgtggtcacggcggacggcagcctgtcggcgcactacgaaaactctctgctcgtcaccgacggcgagccggagatcctgacgttcgcagacgacatttgacgggtgcgtcccgaaaaaccttaggaggttcaaataccttggcaaaagacgatgtaatcgaactggagggcacggtcgtcgaatccctgcccaacacgacgttccgggttgatatcggcaacggccacatcatcctggcgcacatctccggaaagctccggatgaactttatcagaatcctccccggtgacaaggtcacggttcagatgtctccgtatgatctgacgcgcggccgcatcacctggagaagcaagtaggaggttaactacaatgaaagtcagaccgagtgtcaagcccatgtgcgaaaagtgcaaggtcatcaagcgcaagggcaaagtcatggttatctgcgaaaacccgaagcacaaacagagacagggctgatctgaccctgtaagtcctaacacatccgcgccagaaggtcggctccctccggcgggagtaagtcgcctccctttttgcgcgcggaacaaaaatttcgaaaggaatgatcgaataagatggcacgtatcgccggcgttgacctgcccaaggacaagcgaattgaaattggcctgacctacgtttatggtatcggcagaaccagcgcaaaaaagattcttgacatgaccggcatcaatccggacacccgcgtgaaagacctcaccgatgaggaagaagcaaagatccgtgagtgcatcgaccaccacttcatcgtggaaggcgacctgcgccgcagcgtggcgctcgacatcaagcgcctgaccgagatcggctgctaccgcggccagcgtcacagacgcggcctgcccgtgcgcggccagcgcagcaagaccaacgcgcgtacccgcaagggcccgaaacgcacgatcgccaataagaagaagtaagggagggatatgtaatggcaaacgcagcaaaaggcaagaaagttcgcacgcgccgcaaagagcgtaagaacattgaaaagggagccgtgcatatcagctcttcgttcaacaacaccatggtcaccatcacggacacccagggcaatgcgctctcctgggcctccgcaggcggcatgggcttccgcggaagcaagaaatccacccccttcgccgcacagaccgccgctgagacggctgccaaggcggctatggagcacggcctgaagaccgtcgaagtcttcgtcaagggccccggctccggacgtgaggctgcgatccgcgccctgcagacggcaggactcgaggtcactatgatcaaggacgtcacccccattccgcacaatggctgccgtcctccgaaacgccgccgcgtctgattgaaggagggaaatgaattatggctagatataccgaagctgtctgccgccagtgccgcagagagggccagaagctcttcctcaagggcgacagatgctacacccagaagtgcgcgatcgactgcagaggctatgcccccggccagcacggccagggccgcagcaagacctctgagtacggttcccagctgcgcgagaagcagaaagtccgccgctactacggcgtgctcgaaaagcagttccgcagctacttcgccatggcggagaagcgccagggcatcacgggcgagaacctgctcgccatcctggaaacccgtctggacaacgtcgtctaccgtctcggctttgctatgagccgtgcggaggcgcgccagctcgtgacccacggccacttcactgtggatggccgcaaagtcaacatccccagcttcctggtcaagccgggcatggttattacactcaaggactccagcaagagtctcgacaagatcaaggccaacgtcgaagcgaacgcttcccgtcccgcgccgaaatggctggactacgacgccaacaacatggtcggcaaggtcgtggccatgcccgcgcgtgacgacattgacctgcctgtcgaggaacacctcatcgtcgagctgtattccaagtaataaagagaccctcaaattggtaagctgacatccgcagcgccccagcggcgcaacaatacagtaaggagggttaagtctaaatgattgaaattgaaaagccgcgcatcgaatgccaggaatccccggacgatatctcgtatggcaagttcgtcgttgagcctttggagcgtggctacggcacgaccctgggtaactctctgcgcagagtgctgctctcttcactgcccggcactgccccgacgtccatccggatcgccggcgtgcagcacgagttttcgacgatccccggcgtcaaggaagacgtcacggagatcgtgctgaatgtgaaggggatcatcgcgcgcctgcactgcgacggcccgaagaccgtctatatcgaagcggcaggcgagtgtgaagtcacggccggcgacatcaaggcagacggtgaggtcgagatcctcaaccccgagctgcacattgccagcctcggcccggacggcgcgctctccatggagatcacgctcgcccacggcagaggctacgtcccggcggacaagaacaagagtgcgcagcaggtcatcggcaccatcccggtggacagcatctatgcgccggtcctgaaggtcaactacgctgtcgagaacacccgtgtgggcaaccagacggacttcgacaagctgaccatcgaggtctggaccgacaagaccatctcggcgcgcgacgcgctgagcctcggcgccaagatcctgtgcgatcacttcacgctcttcaccgatctgtctgacacgatcggcaacagctgcacggtggtggagaaagagccggagcgccccgacaccgtcatgaagatgacgatcgaggagctggatctctccgtgcgcagcttcaactgcctgaagcgcgcgaatatcaacaccgtcgaagacctcacgaacaagactgaggaagagatgatcaaggtgcgcaaccttggccgcaaatccctggaagaggtcgagcacaagctcgctatgatgggcctgagcctggcgagcgacgacaaccagtaataaccagttactcttatcaaggaggaaaaccgatatgcccggaacaaggaaactcggtaagaccaccgatcagcgcaaggcgatgctccgtcagcaggtcacggatctgctcgacatgggccgcatggagacgaccgtcttccgcgcaaaagagatcgcgccgctcgccgagaaaatgatcacccttggcaagaagaaggacatgaccgcctaccgtcaggcgctggccttcatcacccgcgaggatgttgccaagaaggtgttcgatgaagttgccccgaagtatgccgaccgcaacggcggctacacccgcatcacccgcatcggcacccgccgcggcgatgcggccgagatggctgtcatcgagctcgtgtaaggagcatccgaacaccaattatcatgcaccgaccgttttgcggccggtgcatttttttaggctgcaaaaagcctcgcagagtttgcagccggtgcgttttcgtattttacaggccggtactgtctgtggtataatcatctttcagacagacaacaaggagggacgtgtatgcgcattctggtcgtggaagatgaacaggacctcaaccgcattctcgccaaaacactcactgccgagggctacagcgtcgacgcctgctttgacggcgtggaggcgctggactatctggagggcgcggagtacgatgccatcgtgctcgatgtgatgatgccgcgcatggacggcttttcgctcctggcgcagatgcgcgagagcggcaacgagacgccggtcattttcctcacggcgaaagacagcgtgcccgaccgcgtgcgcgggctcgacgccggggcggatgactatcttgtcaagccgttttcgttcgatgagctgctggcccggctgcgcgtcgtcatgcgcaagcgcggcggcagcgccacgaatgtctttaccgtcgccgacctcacggtcgacaccgcctcgcaccatgtcacgcgcggcggccgcacgatcgcgctctcggccaaggagtttgccctgctcgaatatatgatccgcaaccgcggcgtcgtgctctcgcgcgaacggatcgaaaaccatctctggaactatgactacagcggcggctcgaacgttgtggacgtgtacatgagctacctgcgccggaagatcgacgcggactattccaccaagctcatccacaccgtctggggcgttggctgggtcctgcgggaggaaacatgaaacgtccgtcactaaagctgcgcatcaccggctggttcgcgctcatgatgtttgtcatcgaggcgctggtgctcgcgttcctgctcgccgtcaacggcacggtcgccacgaacgaccccgaggcgcgcctcgtgcgcatggtcgagcacaacgccaaccgcgtcaagtacaataaccgccagttccgcttcagccgcatccattataaccgcagcggcgtttacaccgtgctctatgacgcggacggcaacgtcctgcagggcacgttcccggcggagttcacgcccgcgcagccgctgccgctcgacggggagagcgtgcgcctggtcgactgcggggacaatgcatattacgtctatgatgtgcacgtggacatgatggtcggcagcgtctggctgcgcggcgtcatcgacgcggatgccaacggcggcgtcatgcgcgtcattctgccgctggcgtggtcgctgctgccggtgctgctcgtgctgtcggtcatcggcggctatttcatcgccagccgcgccctgcgccccgtgcgccagctcacggccacggccaacgccatctccgacgggcaggacctcaaggcgcgcatcggtctgccgcacacgagcggcagcgacgagatctatcagctctcggcgtcgtttgacaacatgttcgaccggcttgagcgctcgttcgaggccgagcagcgcttcacgtccgatgcctcgcacgagctgcgcacgccgacgaccgtcatcctcgccgcctgcgaggacgcacgcaaaaatgcgcagacgcccgcggattatcaggcggcgctcgatgtcatcgaccggcaggcgcacaagatgtcggcgctcatccgcagcatgctcgagatcacgcggctcgatcagggcacgcagaaggtcaactgggagtatgccgacctctccgatctcgtcaccgtcatctgcgacgagcaggccatggtcgcgcgccgcggcatccgcatcagctgcgcggccgagccgggcatcttcatcgacatggacgtctttctcatctcgcgcgtcgtgcagaacctgcttgataacgccttcaagttcggcgtggacggcggctggatccatgtcgcgctccggcgcacggctgccggggccgagctgaccgtgcaggacaacggcatcggtatctcacaggaaaatctggataaaatatggcagaggttctatcaggccgaccccagccggcaggaaaacgccggtctgggcctgggcctgtcgatggtgcagcagatcgtcacgctccacggcggcacggtcgccgtcacgagcgcgccgggccacggcacgacgttcacggtcacgctgcccgaacaccacggaaaagaggaaagctgatatgaaaaaaaccgttttgcgtgcctatgcccgcctgatcgcggaggtcggcgcgcgtgtgcagaaagggcaggacgtcgtcatcgaggccgagctcgaccagccggagttcgtgaccatggtcgccgatgcgtgctatcacgccggggcgcgcaaggtcacggtcatgtggaagcaccaggcgctcgaaaagctcgccatccggcgcgagagtgtcaaaacgctccagaccgtcgaggcttgggagcgcgcgaagctccagcactatgtcgatacgctcccgtgccgtatctacctgctcagcgaagatccggacggcctgcgcggtgtcagccccgcgaagatggcccgcgcccgacaggggcgctatggtgtcatcaagccctaccgcgaccagatggagggccgctaccagtggtgcatcgcggccgtgcccggcgtggcgtgggcgaaaaaggtgttccccaacgagacgaaggcccgcgccgtcgaaaagctctgggaggcaattttgcacacctgccgcgtggacgacgaccctatcgccgcgtggaacgcgcacaatgccgacctgcaagcgcgctgcgaccacctcaacagcctcggcatagcgtcgctggagtaccatgcatccaacggcacgaacctcaccgtcggcatgatccccgaggcgcagttttgcggcggcggggagtacacgatcggcggcagctattttaaccccaacctgcccacggaggagtgcttcatctcgcccaagcgcggcgaggcagagggcatcgtctattcgtcgaagccgctgtcgtaccagggccagctcatcgaggatttctccatccgcttcgagcacggccgcgccgtcgaggcgcacgcgcgcacgaacgaggccctgctgcaaaagctcatcgccatggacgaaggctctgcctaccttggcgagtgcgcgctcgtgccgtatgacagccccatcaaccagacgggcatcctgttttacaatacgctgtttgatgaaaacgcctgctgccacctcgcgctcggcatgggcttcatcgacaccatccgcgactacccgaaccgcacgctcgaggagatgcgcgcgctcggcgtgaacgactccatgatccacgaggatttcatgatcggcacgccggatctggccattacggcgcactgccgcgacggccgcaccgtccccgtgttccgggacgggacatgggctttttgaccgaaaccccattttttcgtcgaaataccgcgaaatgtggtgcgctccgattctggagcgcaccatttttctttgaaagtggggaatttgagaaggaaaccgttgcattttcgcggcgcgtgtggtaagatacgcctgcacggaaaatcttaccgcttacttgcacccgacaggaggtgaccggcatgaagcgagcccttttgtgcaccctgatcgcggcggcgctgctgctcagcgcctgcacgcgcgcatcggagagcaccgtgcgcgcgccggatgccggcgcaccgctgacgctgtgcctcggtgccgggccggcagcgctcgaccccgcgcgcacggaaaacggcgtcggcgcgacgtatgtcgtcaatctctttgccggcctgaccggctaccgcgccggcggcgacggcaaggccgagctcacgcccgagctgtgcgcggccctgcccgagccggagtccctgcccgacgggcgcgtgcagtatgtgttcaccctgcgcgacgggctcacgtggtcggacggcacgccgctcacggcggcggacttcgtctatgcgtggacccgggcgagcacgctcagtgacgcggcggcgccgtatctcttcgcctgcatcgacggctacggcaccgggcggctgaacgtcacggcgtcggccgacgggcgcacgctcaccgttgtgctcgcggaggccatgcccacgtttttgcagctgtgcgcccagccggcgtatgcacccgtgccctccggcgcggcggacaccacgagctggacggcagacggcgcggcctttgtcaccagcgggccgtacacggtcaccgcgtggacgaccgagggcctcacctacacgaaaaataccgcctattgggacgcggacaacgtcgcggccgagacggtgcgcttcgtctttcagagcgacgccaacgctgcggcgtccgccttcctcgcgcgcgaatacgcgctcagctggcccgtaccggatgacgcgctcgacgacctgcgtgcaaatcacgcgcccgagctgcgcaccgtcagccagctcggcacgtacagcctctgcttttccatgagcgacccggcgctgagcgccttctcgcagacggagcgcgcgcagatccgcactgcgctcgccctgctcatcgaccgcagctatctgtgcagcgagatcacgcccggcgcacagcagagcgcgaacgcgcccatcccgtccggcgtctcggacgccgacggcagcgccttcatcgcgcacaacggcgcggacggcaagggcggcggttattacggcagcgatcacgaggccaactgcaagcaggccatcgcgctcctgcggcaggcggcggagtcgtccggccggttcacggtcagcacgcagggcgtgtgcgccggcttcccggagctgacgtacctgacgtccgacgcggcaggccacgtcgccatcgcggactatctcacggagctctacggccgctacggtatttcgctcgcggtcacggcgcaggacatggacaccttcctcgccagccgcgccgccggaggctattcgatcacgcgctgcagcttcagcgccgatgtggacgatcccatgccgtttctctccctctgggcgagcggcgcgggcagcaactgcgtcgccctcggccgcggcgcgcacgcggactatgcgggctacagcgtcacgctcgacggccgcacgcgcgacaactgcacctgggccgagtcgtatgacgcgctgctctaccgcatccagagcagcggcgacacggccgagcgctattcgctcatgcaccaggccgagacgctgctcatgcagacgggcgctgtctgcccgctctactggtacacggacacctacctgtgcaacacgcacgtgcagggcctgctgtccggcccgctcggcgcgcagtacctgatgggcgcgcaggtggaaaagtgaatagaaatgtgaatgcaaaaagcagccccatcgccgtttccggcggtggggctgttgcaatatgaaatatcacaggaacacgaaaaacagcatcacgatcaggtacgcgaacgcgagcgtcatcggcgcgagcgcgagcacggcggtcagccgccagtcatctgcgctctccacgaccgtgccctcatacaccggctcgcgcgttccggcgagcgtgccgtgcaggtagctgcggtagagcttcagaaactgcttgccgtcgcggcggccgatgctgtaggatgcctgctccggcgagcggggctgcagggcgtggtgtgtgcgcatccgatgttcctcctcatgcacctcaaaaggtgtcgaatctttcacaatgctattatacgcatccgggcgctgcgcgtcaaccgggtaagttttccggtgcggcggtctcgggcacgtgcgtcatgtcgggcgacggctccggcgtgatctctggggtgggttccggctccggcgtcggcggcgggggcagaatgatctgcggcgggttcacgctcgcgggcgtcggcgtgggggccgcggtctgcaccggcgtggacgccggggcagggtgcttgcgcgggatgctgccgaccgcgagccacagcgccgcgatcacggcggcgagcacggccagcacgacggccacggtcaggatgatctcgcgccggcgcgcgtgcgcgtgctttttgcgctgggtctcctgctcggcgatccgtgcggccggcacttcaaaccgccgcgtctgcgacagttcctcggccggcggctggggcaggggcacggccgtctccgcgtcgagcgccgtgatctcgatgagcacgagcgtgatgttgtcgcccggcccggccgcgagcgcctgcgccatgagcgcctgccccagctccggcagcggcaggtcggcgccgagcgctgcctgcagttggctgtcgctgagcttgccggtcagcccgtcggtgcacagcagcagccggtcgcccacggcgagcggcacgctggccgcgaaatacggcatgagccgctggcgcgcgcccagcatgcccagatactgcgtgagcacgtgcctgtccgggttgtcggtcgcgtcggcggcggcagcgccggcgtcgagctgctcctgatacttggtgtggtcgcgcgagatgcgctgcagcgcgccgccgcgctgcaggtagatgcggctgtcgccgacattgcagcagtaggcgcggttgccggtcaggtgtacggtcgcggcggtcgagccgccgatctggccgctggccgcgatcatgtcgcacacggcgacatttgcccggcggaagaaatcgagcgcgtcaaacggctcgtcgctgctgcactggtgcagcgtctgcgcgcacagcagcgccgcctgctcgccgttggcctcgccgcccatgccgtcgaacacgccgtagatcagccgccggctctcctgctcggcggccgcctcggctacggggatggcggggtcgcgcttgaacgtgccgttgcagtagtagttatcctcattgttgtcccggccggagccgatatttgtctgcgcgtaacacagcgcccgcatcgcgcgtccctcccttgctgcgtgttttctgctgctatcgtaccgttcggtggccggtttgtcaacgtgctgtcgggcgggatgcggaaaaaatctcgccaaaaattgccgccgtggggattccatcggcggcggttttgtgctatgctggtcaaaaaagagcgccgccgtgtgtccggcggcgatgggggaacggatatgaacgaacgattggccgcggcgctcgagcagctgcccttctggccgaacctgaccgagccgcagcgcgagcttgcgcggcgcggcgcgcgcctggcgcagtatgaccgcggcgcgctcgtgcacgggtgcgacgggcagtgcctcggcatgatccgggtgcagagcggccgcctgcgcgcatgcatgctctcggacgacgggcgcgagatcacgctctaccgcctcacggacggggacgcctgcgtgctggcggcggcgtgcgtcatccggcagatcacgttcgaggtgcagctcgtggccgatgcgccgacggagctgctcatcctcggcgcgcacgtgttccagcagcttgcggcggagaacatccatgtcgagtgctgcatgtaccgccttgcgaccgagcgcttttccgatgtcatgtgggcgatgcagcagctgctgttcacgagctttgacaagcgcctcgcacagtatctctgggacgagtccgaccacgcccgtgcgcccgtgcgcgccacgcacgagcagatcgcgcgcgacaccggcgccgtgcgcgagaccgtcacgcgcatgctgcgccacttcgccgacgacggcatcgtctcgctcggccgcggcacggtcacggtcgcggacgccgaaaaactgcgccgcctcgccggaatgtgactttgccacagaacgcgggtggaaaatctgttaaaatcagcacatacgaatacagacgacaattccagaaaggaagatcatcatgattacactgacgaaagaaaactttgcgcaggaggtcctgcagtccgacaagcccgtgctcgtggatttctgggcgacatggtgcggcccgtgccgcatgatggcccccgtggtcgaggagctcgatgccgagcacccggaatacaagttcggcaaggtcaacgtggacgagcagccggagctcgcgggccagttccgcatcatgagcatcccgacgctgatggtgttccgcggcggccaggccgcggctgtgaaggtcggcgtgacgccgaaggaagaactgctcaaactcctcggctgagaccgggggaattgtggataagaaggaggagaccaatatgcactgcactgtgaaaatgaccgaggatctgtattgggtcggcgcatccgaccgccgtctggccctgtttgagagcgtgtaccccattccgcgcggcgtgtcgtacaacgcctacgtcctgctcgacgaaaagaccgtcctgctcgacacggtggaccagtccgtcgccggtcaattctttgaaaacctcgcccatgtccttggcggccgcccgctggactacatcgtcgtgcaccacatggagcccgaccacgccaagacgctcgaggagaccgtgcgccgctaccccgaggcgaagatcatctgcaacgcgaagatccgcgacatgatccgcaactacttcacctttgacattgacgcccgcgccatcctcgtggccgagggcgatacctactgcttcggcaagcacacgtttgcctatgtcatggcgccgatggtccactggccggaggtcatggtcagcttcgacaccacgaccggcacgctcttctccgccgatgccttcggcacgttcggcgcactcaatggcaatctctatgccgatgagtacgacttcgagcacgactggctgcccgatgcccgccgctactatacgaacatcgtcggcaagtacggcacgcaggtgcaggccttgctcaagaaggccgccacgctcgacatccgcatgatctgccccctgcacggcccggtctggcgcaagaacatcggctggttcgtcgataagtacagcaagtggagctcctacacgcccgagcaggagggcagcgtgctcatcgcttactcctccgtctacggccacacggaaaacgcggcacaggtgctcgccaccatgctcgctgagcgcggcgtgcgcaacatcgccatgtatgacgtctccgtcacgcacccgagctatgtcgtggccgaggccttccgctgcagccacctcgtgttcgcgtccacgacgtacaacgccggcatcttctgcaacatggagacggcgctgctcgacatcgcggcgcataacctccagaaccgcaccattgccctgatcgaaaacggctcctgggcgccgacggccggcaagctcatgcgcggcatcctctccaagctcaagaacgtgaacatcctcaacgagacgctcaccatcaaatcctcgctcaaggacgaccagctcgccgcgctcgccgagatcgcggacgcgctcgtggcctccatgccgaagcccgcgccgatcgtcaacgagggcaagcagaaccccgccgcgctcttcaagttccagtacggcctgttcgcgctctccgcccgcgaaggggacaaggacaacgcctgcgtcatcaacaccgccatccagatggccaacaagcccgagcgcatctccatctcggtcatcaaggccaactacacctgcggcatgatcgagcgcaccggtgtgttcaacctctcgctgctgacgaaggaagtgccgttcgccttcttccagcacttcggcttccagtccggcgcggatgtggacaagttcgcggactggaccgactgcgcccgcagcgacaacggcctgtattacatcaaccgctatacgaacgccatgttctcctgccgcgtcgtcgagagctacgaccagggcagccaccggctcttcatcgccgagatcacggagtccaagctcttcagcaacgacgagaccgtgacctatgactactaccgcagccacatcaagcccgcgccgccgaagctcgcccctgccgagaaggcgacctgggtctgctccgtgtgcggctacgtgtacgagggcgagacgctcccggccgatttcatctgcccgctgtgcaagcacccggcgtccgacttcgtcaagcacgaggccaagcccgcggaaaagcgcgtcggcttcgtctgcaccgtctgcggctacgtgtacgagggcgcggatatgccggacgacttcgtctgcccgctgtgccaccacccgaagtccgatttcaaaccgctcgcgtaagatatcctgatagagaaaaatgccccgccgcaggtttctgcggcggggcattgtatgtttccgttatttcggcagcacgcgcagccagttgtcggcgaagagatcctgcagcagcgcggcgtcatagccgcgggctttgatggccgcatagagctttgggtagtcctgcacgccggtgatgccgccgccgagcgtgtcgcacccgtcgaggtcgccgccgagcgcgagcgtcctgtcgccgccaaggtcgagcagatgctcgacgtggcgcacgacggcgtccatgccgccgccaccgagaaagtccgtgtagaggttcagcccgaccacgccgccgctgtcgcggatggcgcgaaagaggtcgtccgagaggttgcgcgtgtgcgcgcacacggcgcggctgtttgcgtgtgaggcgatcaccgggccgagcccgaggcgcaccacgtcccacgccgccgcctccgacaggtgcgacacgtccggcagcatctggtgcgcatacagcgcgcgcacaaagtcgcgcccctgcgccgtgagcccctgcgcctgcgcgtcgcagtgcgagcctgcgagggcgtttgcgtggttccatgtcagcgtcacgtatacgcactcccacgccgccgcgtcgtccagccgccgcgggtcgcagtcgagcagctccgcgccctcgatgccgagcagcgcggccgttttcccggcggcccaggcggcgcgcacgtcccacgccgtgcggcagcggcgcacgagatcggcattgcgcgcgcattcccgctccagcagcgcgtgctgccgctgcgcgacggtgtagagcggggcgcttgttttgctgctgtcggcaaacacggcgaagatctgcgcgtgctggccgagggccgcgcagcgcgcaagatcgacgtggccgccgttttgccgcagaccctcgccagtggtcatgcagcgcgcgagcgtgtcgcagtggccgtcaaagcagcgcatcacgcatcctcccgccgcgtcacggcctcgagatagtcgtagtacggcagcaggaagccgaacccgcgcacgagcgcgtctgtcagcgcgggggagaagagcaggtcgtcgtgttcgcgcacgcacgagaggtcgagcacgcgcttattgtaccacgggcgcagcagcgcgccggggtcgcccttcgcgcgggcgtagtcctgcccggtgagcacgaaggtatcctgcgcgttcaggcgctcggccagtgccgtcagcggcaggggatcggcgtcgatcgcgcggcggaagcacgccatcgtgttcgccttcgcccagtaaaagcccatgccgtagctgtagttgtgcggcgtgatctcgaaataaaacgccgggatctccggcccgcggctgctgtcgcaccgcagcgtgaaccagaggttctccttatacggcccattgccgtgcagccgccgcgcgtcgcggtagatgcgcgccacgtgcagataccacttccggtcggggtacgcctgctcgagcgccgccgtcacgtccgcagccagcgccttcatgggccggtcgagcgtgtcgagaaatacctgcttgtgctccagaaaccacgggcgctcgttgtgaaagcgcagctcccagagaaagtcgatcgttgcgtcggaaaagcctgtgaacatgtgtgtttcgctccttgtctccgcgtggaaagtatccctatcttacgccgaaatatccgcccgcgcaagaggctgcaccgtggagaaaaccctgtatttttcagggtttttgtcacattgctgaattatggttgcatttttgacaaatcttttgtatactatctatcgcgcggctgctttgccgcggggaaaatgaaaaattgcagaggagacaaatcatgattgacaaaattgacagtgtggtcaatgcgatcggcggctttttatatcagccgtacatcgtgccgctgtttctgatcgtcgcgggcctgtatttcacgatccgcaccggtctgatccagttccgcctgtttggcgagtccatccacgtcgtcgcggaaaagccgaaggagaagggcagcatttcctcgttcggcgcgctcatggtgtccacggcgtcgcgcgtcggcaccggcaatatcgtcggcgtgtccacggccatctgcctcggcggcttcggcgccgtgttctggatgtgggtcgtggcgctgctcggcggggcgagcgccttcatcgagtccgcgcttgcgcaggtctataagaaaaaggacggcaagggcggctgcgtcggcggcccgtcgtattacatggagcaggcgctgcaccagcgctggctcggcgtcatttttgccgtcgtgctcatcctgacctatgtggtcggctacaacatgctcgcgtcctacaatctgcaggacgccttcgctggctttggcttctacgccaagggccgcacgccgtacatcatcggcgcgatcctggcggtgctgttcgccgcgtgcgtgctcggcggcggcaagcgcctgaccaatatcacgggcgtgctcgtgccggtcatgggcgtgctgtacatcctcgtgtcgctcgtcgtcattttcatgaacatcaagatcttcccgagcgtcatcgccaacatcttccgcgatgcgttcaatttcaaggcggcgttcagcggctttgctggttcgtgcatcatgtggggcatcaagcgcggcctgtactccaatgaggccggcatgggctcggcgccgaacgcggccgccacggccgacgtctcgcacccggccaagcagggcctcgtgcagatgctgtccgtgttcatcgacacgctgctcatctgctcggccacggcgttcatgtgcctgtgctccggcgttgagccgaccaaggaagcggccggcgcggcctatgtgcaggcgtccatgcagcaggcgctcggcagcttcggccccatcttcatcgccgtgtccatgagcctgttcgcgttcacgacgctcatcggcaactactattactgcgagggctgcctgaagtatatccttcggcgcgacccgagcaaggcgggcatgacggtgttccgtctggctgcgacggcgctcgtgttcgtcggcgccatcgtcagcgccggcctcgcgtgggatacggccgacatgctccagggcacgatggtcatcatcaacatcccggtcatcctcatcctcagcaacaagggtctggccgtgctcaaggactacatgcgccagcgcaaggagggcaagaaccccgagttccacgccgccgacatcggcatcaccggtacggactactggaactgagccttccgaaaacagaacagaacagaaaaacaccggccgtttcggccggtgtttttcgccgtacaggcgctttgtcacgcggggatgcgccggtacagccgcgcacgcagcagcgtcgccagtgcgagcttgaccgcgtccggaagcagaaacggcagcacgcacttggccagcaccacgccgagcgtgatggcgcccgtgcgggtgtagacgatgagaaaccacgccgttccgaacgcatagcacacgagcagccccacggccgccgagagcacgaacacccactggccctgcccccagtgcgcctgcgcgaaggtgatgatgagcgtcagcagcacaaagccgacgaggtagccgcccgtcgtgccgagcagggacgcgaacccgccgcgaaagcccgcgaacaccggcgcgcctaccgcgcccagcagcagatacaccagcacgctcaccgtgccgcgcttgccgccgagcaggccgcacacggtgaagattgcaaacgtctgcagcgtgaacggcacgtccgccgggatgctgatccacgcgcacacggcgatgagcgccgcgccgatcgcgcagaagcacaggtctctggtcgaaaatttcataggatctcctccgattgtaaagtaaaacaaagaactacttgacaatcggacgatagcacacgcgcgccaaattgtcaaccggttttgaaaaatgctttacaatttcgctgccatcggctaaactgacaccagagaaagatccaaaggagtgtgatctcatgctgcgggacgatgttttgctcctgctcacggaggcggaggggtatctctccggcgaggaaatgcgcgaaaagctgggcgtgtcgcgcgcggcggtcagccaggcggtgcgcgcgctgcgcgcagacggctatgatatcgacgcggtcacgaaccggggctactgcctgcgcgcgcggccggacacgctcacggccggggacgtgctgtcctacctgccggaggcgcggcgggcgacggtgcagtgctttgcgcagatcgactccacgaacagttatctcaaggccgaggccatgcgcggcgcgccggacggtctgtgcgccattgccgaccggcagacggccgggcgcggccgggccgggcggccgtttcgctcggacgcggggcagggggtctacctgtccatgctcctgcggccgaattgcgcgcccacggcggccatgaccatgacggcgcacgtcgcggtggccgtctgccgcgcgctcgaggcgtgcggcgtgcagccgggcatcaagtggacgaacgaccttgtcctcggcacgaaaaagctttgcggcatcctcacggagctgaccgtcgaggccgagaccggcacggtcgattccatcgtggccggcatcggcgtgaacgtccaccagcggccggaggatttcccgccggagctgcgcaccatagcgggctcggtccggtccgagacggggctggagatctcccgcgcgcggctggcagcggaaatggtgcgcgcgctcgaccaaatgtacctcgactggcagcgcgacccgcgcgcgtatctcgacgattaccgcgcgcgctgtgtcacggtcgggcggccggtgcgcgtcgtgcgcggcgaggatgtccgcaccggctttgccgaggcggtggacgacgacttcgcgcttgtcgtccgctggccggacggcacgcgcgagaccgtcaccggcggcgacgtgtccgtgcgcggcctgtttggctatctggattgaatacgaaagcagtggctgcatcgcttggatgcagccgctgcttttgactggcggaaagtctgctgggttttcgccaaaatgcctgcagtctgctgtgcgctgcgttcaagggagaccgcgcgacgcacgacgaggccagagccatgctcggcaggatggtggagctacagaagctttgggacgatgcgctggtggacgcggcgaagacgaaggctgcaaaagaaaacaccgccggggatggcagtgtgcaggagcaggcgcgtcaagcgtatgaaaataaaaacttggctgaggatagcgaagtctataattatggttttctgacttcgctgccggatatgcgcattacgagacttccggaagtaccgatgatcagagacacaggcgggaaggtgaattccgctgttgttatcactgaaggcatgaaaaatgctcgcagcgttggcggcgagcgcgatgggaaaatctatgtccaaaatgcgtatacaggtagacaactccgcattgacacgtccagcattcggcatggtttgaacggcggggtaaaccgtttgataacgaatgccagacttggtgctgtgattggtgatgtggttcaaaatgcagttcctgtgaacgcgctgtacaacaaggcaaaagacgtgatgggcacatacgctatggcggcttatgcgaacgacagccgaaaccgagagtttgtggccattgttacagttgagcagagaagtggaaatatttccggtttggaatcttacgatgtcactcatgcggtcagcgggaggcaaaaaaatagcagccaggcggacacaaagtcccagggtgtttaccctatcaaggctgctaaaataagtatagctgactttttgagtattgtcaacagcacacatcagagcgtattgtcggacgatgttttgcagcatttcagagaatcgaggaacccgaatggagattattctgggcgggtgaaattctctgaacgcgacagtgcaggaaacgagctttcgcagcagcagcgtgagtttttcacaaacagcaaagttgtcgatggcaacggaaatttgaaagtgatgtatcgcggcggtaatggcgatttcacagtgtttgaccgcaaacattccaaagggagcaatctttacggccgcggattctatttcacggacagtgtgtctcatgccatccaatatggtagcgcgcgtgcgtactatttgaacattacgagccctgtgtctaccacggaaaccacgatcgccagaggtcaaatgcgaaagttcctcgaagctgttgctgcaaacgaagatgattttagcttcgaaaactatggctatggctctacgccgagcagcgttcttcggtcggtctataccagcgggcgcagcgattttgcaatgctatatgatgttgaccagacggctgtcggagacatggtggcatcggtcgagctgttcaataaagtaaatgggacggattatgatggactcattctcgacacggagacggtcgcgttttatccagaacaaattaagaatgtagataaccgcgagcctaccggcgacccggacatccgattttctgagcgtgacgacacacggacagaccgcgatgtgctctccgatgctgtggacggagacgctgccaacgtgcgcgagaccgtcaccggcgcgggctgttcggctatctggactgaatacaaaagcagcggctgcatcgcttggatgcagccactgcttttctgcgcgggtttcagtacgcgctgatgggcagcgagtcgtcgtcctgccccttttccacggagcggatgacgatgtcgtagccgacgttctcgttgacctgcacgtgcacggtctcgcccgcgcggtggcccatgacggccttgccgacgggggactccttgctgatgaggccctcgagcgcgttttgccgcagcgtcgtcacgaggcggatcgtctgctcctcgtcgtcgtccgggatatagatgacgaccttgtcgaacagacccaccacgtcaccggacgagtggtcggagatgaccttcgccgtgtccaccatccgctgcaggtagcggatgcggctgtcgttgcggtttttctcgcgcttggcggccttgtattcaaagttctcgctcaggtcgccgaagccgcgcgccaccttgacctcctcgatcagcttcggccgcagctcccgcgtgcggtagtcgatctcgtctttcatcttctgaatgtcgacttccgtcagttcgtcatacatgaaaaacacctcgatttctcaggcgtccatcttatcacattccgtgtcggaagaaaaggctttgccgtcgttttccacgagctgcctgcgaaagatcgcgcggaacaccccgcgcgtggccggcccggcggcaaagatctgccacagcagcgcccacggcaggttgcggtagagcgtggcgagaaagcgcgcgaaaaactccgcgtcaatgcccgtgaacagcgccgttgcgatcaggctcatcgacgggcacatgaccatgaccgtgcagccggacacggccagcgtcacgagcagcgggttgtcgcgcccctgccggacgaatttgtgcgcgatgtgctgccccgcgcggctgccatagagcatggagacgacaaagacgatcgcgcccatgaacgcggtctccttcagcgcgggcaggaagaccgcgttggacatcgcgccgagcttgtgcgcgacgttggcgacctccatccccagcgccatgaaatacgacatcagcagtccgaagaccgcaccctgtgtttttgtctgcggcatattgcagacctccttttttgatgtgcggctgctttgcgccgggcaaacaaaaaagcgcacagcgtccggtgtccggatgctgcacgctttgcgttcctgttgtgtcagtgctacacgagccagcttcttttttagcagatcccggccgaaaagtcaagcgccggcacatgattttccgctccccgggcacactagcccatattgaaaggagtggttcggatggacctgctgcaagtggcggtcacgtccgtgggtgcgtttgtggcgctgtttctgctctccaagctcatgggccaccgccagatctcggaactgagcgtctttgactacgtcaacggcatcaccatcggctcgatcgccgccgagatggccacggagctggaaaaaccgctgcgtccgctcgtggccatggtggtctgggcgctgctggtgtggctgctcgaggcgctgacgagcaagtgtccgcgcctgcgcaaatatatcagcggcgcgccgtcgatcatctttgacaacggcaagctctaccgccgcaacatgaaaaaggcccgcctcgacctgagcgaatttctcatccagtgccgccagcagggctttttcgacctcggcgccatccagacggcggtctatgagcccgacggccgcctgaccatcctgcccgtggcggcccgccgcccggccacgccggaggacattggcattgccccggaaaaggagcagatcttcaccgagctcatcatggacggccgcgtcctcggcgagaacctgcaccgcatgggcgtggacgagacgtggctgctcaggcagctgcgccagcagggttaccacagcgcgcgcgaggtgttcctcgccgtggccgatgccaacaagcaggtggccgtctaccccgtcagcacttgacagattccgaaaaccgcgctatgattgcttcaaattattgaactttttaagtgagaggcgatcattatgcagcatacggagcttcggcgcacggggaaattcctgcttttctcgtgctcggccgggctgatcgagctcggcagctttgcgctcttcaacgaggtgtttcactggccgtactggggcgcgtacctgacggcgctcgtgctgtcggtgctgtggaacttcacgtgcaaccggcgctacaccttccgctcgacggagaaggtggcgcgggccatgacgctcgtgtttttgtactactgcgcgttcacgccgctgtccacgctgctcgagcaccggctcgcggacgtgcaggggtggaacggctacctcgtgacatttttgaacatggtgctgaatttcgtgacggagtttctctaccagcgcttcgtggtctaccgcaactcgctggacacgaacaaacttgcgcacacccattcctgatcggatccatttcccgggcgcagcgggcgctctgctttttcggcagagcgcccgctgcgccgtcttgtattttctgcgcaggtttggtatcataaggggcatgagatcgacagctccgcgccaggagcgggagggagcggacatgaaaacagccatcgtgaccgacggaaaataccggtcgtccatcgcggcggtgcgcgcgctgcaccgcgcgggctatcaggtgatcgtgacgcagacgcgcgccgacgtgcacgccgtgccggcagtcgcatcctcgcgctgctgcgccgccttccggtggatcgacggcgctgcggccgacgacggctacgcggaccggctcgcggcgctgctggagacgtatgaccacccggtgctgttttgcgtcggcgcggtcacgctcaacacggtcgccgcgcagcgggagcggtttgcccggattgcggattttctcatcgcgccccggcccgtgctcgacgcgctcaatgataaggaaacggtgcacgcgcgcgcgcagagcctcggcattcccgtaccgcggcagtatgatggcgtgccgccggagcgctaccccgttgtcatcaagccgcactgcggcgaaaaattcggcctcaaggccgccgaccgctacgccgtcgccgatacgccggaggcgtatgcgcagatcctcgcgcgcatgcagcgctacgatccgtcgcccatcgtgcaggacaagatcgccggcccgggcatcggcgtgagcctgctgctggaccgggacggccgtatgatcagcgcgctgtgccaccgccgcattcgggagtacccgatcaccggcggcccgtcgacctgctgcgagagcttttatgacgccgcgctcatcgaccgcgcgtaccggctgctgcattcgttcggcttcacgggcatggccatggtggagttcaagggcgactgcctgctggaggtcaacccccgcgtctggggcagcttcccgatgacggaggcggcccagagcccgcttgtggcgcactatgcccgcgccgcggcgggggagcgggtggcctatgccgcgcaggattaccggaccggcgtgcgtatgcgctttctgctcaatgacacgctcgccgcgctgcactatctgcgcgccgggcgcatcggcgtgttcctgcgcagcattgccgacctgttcacggcgaaggaggccctgcgctgccggggcgacaaccgcgtgttctgggtctatctgaaaaacagcctgtttgcgcgcgggtgatttccgcgcagagaggagcttctgcccatggaggtcaaactcgacctgcacattcattccgagcactcgccggacgggcgtatggcccttgacgagatcgtcgcgtgcgcgcgtgcacggggcttgcagggcgtcgccgtgtgcgatcatgaccgcgccctggccgagacgtgggacgcgccggattttctgctcatccccggcattgagctctcgacggatcgggggcatctgctgggcctgttcgtcaccgagcagatcgaggcacgggagctggacgccgcgatcgacgccgtgcacgcctgcggcggcctcgccgtgatggcgcacccgttcgagcgcagcagcgatgcacagcggctcgacgcctacctcgaccggctcgacggcatcgaggtctggaacggccgggccgaccgcaaaaacccgcaggccaacgccatggcgtgcgcgcttgcgcagcgcgcggcaaagccggtcacggccggcagcgacgcgcacctgccggaggagatcggcaacggcgtcgtgacgctggaggccgacgcgctgacgctgccggccgtccgtgcggcgctgctgcgcggggcgacggccgtggacgggcggcgcggaaaggcgcgctatgtcgccgagagccagctgaccaagcgccggcgcacccatgccggcgcggcagcctatgtcaagtgggcgctctttgccgcaaagtgctgcctgcaggatatcacttggaaaggggagacctatcatgtcctggatcgttaaagtaggaaagcagggcaaaaagatcgtcaagaagctcatcacgcccgcagaaaaacactatgtcggctacacccggcgcatcgagcgcgtgcacacgacgcggcgcatctgcgccatgacgtttgacgacgggccgatgggcctgcccgcgtcgccggaccggttcgacggccggacgctcacggacgtgctgctcgacacgctggcgcagtacggcgcgcgcggcagcttcgacgtcatcggcgacacgagcgccaactaccccgacgaggccggaaagctcggcagcgctgcgtggggcggcgtgcgctttgaccattacccggacattcactgtgacgagcagggcggcgcggagcacaacgaccgcctcatccgccgcatgctcgccgagggccaccagatcacgaaccacggctaccggcacatcattttcggcaagaagccgttcgtgtacggcgcgcgcgaatatctccccggctttgacgccgcggtggaggatctcacccgcctgcacacgctcatgcagacgcgctacggctatacgatgacgctcgcgcgcccgccgcactatgtggacaagatgaccggcggattcacgagctacgatgtctatgaccacatgggctatcagtacatggcggcgtcgtttgacggcgcgggctggctcccgtccacggaatcggacccggaggcggcgctgcaggcggagatccgcgcgatggtcgagccgatgcgcaaggcgctggaaaaagacccggactttttctgcggccagatcattttccagaaggacggctacaacatggccaagcgcacgccggtggccttcgccctcggcgagcagctggcgctgctgcaggaatacggctatcaggtcgtgccggtgggcgagctgctggcggagagcccctttgcggacgtcggccgcgacgagccgctgtttgaccgcctgacggcgctcgcacagcagcgggcgatcgtcttttctgataaccgcctgcggctcgacgatcccatgacggtgggcgagctggcgatgctgcttgcgccgaaggcggagaccatcacgcgccgcgtcgcgcagctgcgccggatcggccgcgccggcgcttacgacggcgcgatggcctggtgccgggaaaacggcctcgtctccgaggcggcgcacccggcggatcacgtgaccgcgctgccggaggcgtggttcgttcccacggacagcttcacccgccgggatgtctatgcggcgttccgcatggatcggctctgagcgatacaaaaacaaacagcgccggacggaagcccgtccggcgctgtggagactgtcggaaaacccggagggttttccgacaaaggacttgcagtctgctgcgcgcataatttgtgtgcctacggcgcacaaattccacacttgcagcctgagaagtattttctctcacgcgcatgtcgtgagagaaaatgattgcaatgctttgccgcctgcgggcggcaaactctgcgaggcttttttgacacgctggacagcgccggacggaagctcgtccggcgctgtgcgtttatgaaagtttgaaatccgggaaatacttttctgcgaagggcacgcgctgcacctgaaacgtccgcccgcgcaggtattcgagcctgcccgcgtccgtcggcagcgtgaacgtgagcttataggagtagagcatctgccccgtctcgccgtaggtgcggttgatgcgctcgcggccgtactttccgtcgccgagcagggggcagccggcggcggccatctgcgcgcggatctggtgcgtgcggccggtcagcagccggcactcgacgagcgagagccccctggccgagcacaacgtgcggtattccgtcacggcggtcttggcaccgggctgcggctttttcgtcacgtagacctggtttttcaccgcgtccttgaacagatacccctccagccggcccacggcgggcttcggccggccgcagacgacgcagaggtaggatttttcgatctcgcggccgcggatcttgtcgttcaaaatgcgcagcgcctcggcatttttcgccgcgatgacgatgccgccggtgttgcggtcgatgcggttgcacagcgcgggggtgaaggcgttttccgccttcgggtcccactcgccggtctggcgcaggtaggcctggatgttcgagatgagcgtgtcccagctccactcgcccgcactgtggcacagcacgccgggctttttgtccgccagcaggatgttttcgtcctcgtagacgatgtcgagccgcggcgttgcgatcttcagccaggcgttgtgctccgtgggcttttcaaaaaactcgtcgttgatgtataattgcagcacgtccccctcgacgaggcgcacgtcgcgcttggcggccttgccgttgcgcttgatgcgcttgaggcggatatatttctgcagcagcgattccggcagcaggggaacggccttgccgacgaagcggtcgagccgctggccggcgtcatttttgcgtatctggatctctttcatgtcacgcaccatctccacgcaacgattatcgcggattttcagcgtattgtcaacacaaattcctgttgacaattggggtggatatcatctataatactaaagcgattgtgcgaggtgcgctatgaagctgaatctgagagaaatcatagaaattcccggcggcagtgttccgtttgcgcaggagctggacacggccctgctcgactttccctccgtccgggcctacaccgcgccgatcacggccgagggcaaggtggtcaatacggccggcatcctcacgctgcagggcaaactgcacgcgcagatgctgtgtgtgtgcgaccgctgcggcgcggagtttccgcgcacggtcgacctcgacctgcacgccgacatcacggcggatgcgcaggacgacgatcctgaggtgtttacgctcgacggagactggctcgatgtggacgaggtgctctccaccagcttcatcctcagcatggataccaagtgcctgtgcaagcccgactgtgccggactgtgcgaccgctgcggcgcgaacctgaacctcgggccgtgccggtgtcaaaaaccccgcgatccaagaatggctgtattagagcagcttttggataataaaactgacgaagaagaggaagctgctcataacagcgactgacgaggaggtgtcatcatggcagtcccgaaaggaaaagtgtctcgacagagacgtgacaagcgtcgttcgtcccactggaagctcaccgctcccgcgattgtgaagtgcccgaactgcggcgcattcgtcatgccccatcacgcctgcaagacctgcggcaagtacaacggacgcgacgtcatcaaggttgacgactaaaagaagctgagaagaggagcacttgcccctcttcttttgctatgtgccggagtttcccggcgcatagcaaaggaatcccgagcaaaggaggcgcggcgtatgcatcgctgcacgatcagccacatcgaccccgacagcccgctgcgccacgcggcccatcccggcgaccggctggtgtccatcaacggcaacccgatcaccgatgtgctggactataaatattacgcctatgacccggagctggcggtgtgcctgcgccgcccggacgggacggagcacaccgtgcacgtgtcgaagcccctcggcggcgagctggggctggactttgagacctacctcatggacaacgcccactcgtgcgccaaccactgcgtgttctgcttcatcgaccagatgccgccgggtatgcgcccgacgctgtatttcaaggacgacgacgcgcgcctgagcttcctcatgggcaattatatgacgctcacgaacctgtccgagcgcgaggtgcagcgcatcatccacctgcacatcagccccatcaatgtctccgtgcacgcgacggacccggagctgcgctcgttcctgctcggcaatccccgcgcgggcaaaacgctcgagatcatgcggcgcttttctgacggcggcatcaccatgaactgccagatcgtctgctgccccggcctgaacgacggcgcgcagctgcagcgcacgatgcacgacctcgcggcgctctatccaaaggtgcacagcgtgtcgatcgtgccggtcgggctgacgaagttccgcgaggggctctacccgctcacgccgttcacgcccgagcacgcggccgagacgctcgaccttgtcaacgccttcggcgacgaatgcgtcaaaaaattcggcgcgcgcatcttcttctgcgccgacgagctgtatctgaaagcggggcgcgagctgccgccggaggaattttacgaggaattcacccagctggaaaacggcgtcggcatgctgcggctgcagcagacggagtttcgctcggcgctgagcctgtccgatccgccggacggcgtgccgttttccatggcggcgggtgtttcggcggcgccgtttctggaaaaacttttgtgtacggcgcaggaaaagtatgctacaataaaaggacacgtctacgcgatcgaaaatgacttcttcggccgcagcatcaatgtctccggtctcatcaccgggcaggacctcatcgcgcagctgcgcgggaaggatctcggcgagcggctgctgatctcgaacaacatggtgcgccacgacgagctggactttctcgacgacattaccctcgagcaggccagcgccgcgctcggcgtgcccatctaccccgtggacgccgacggcttcgctctctgcgacgccatgttcggcatcctgccggaggtgcacctgcccgaccggggcaatggcagcaccgacggcgcggaatactacaaatacaatccccataaggagggataatcatgtccagacccctggttgcgatcgtgggccggccgaacgtcggcaagtccatgctcttcaataagctctgtggccgccgcctgtccatcgtggaggacacgcccggcgtcacgcgcgaccggctctatgccgagtgcgagtggtgcggccgcacgttcgatatcgtcgataccggcggcatcgagccgagcaccgacaatgagatcctgctcttcatgcgcgagcaggcgcagctcgccatcgacgcggccgacgtcgtcgtgctcgtcaccgagatcggcaccggcgtcaccgccgccgatcaggaagtggccaatatgctcctgcgctcgaaaaagcccgtcgtgctggccgtcaacaagatggactccaccggcgcggtcgaccccggcatctatgagttttactccctcggcctcggcgacccgatcgccgtgtccgccgtgcacggccacggcacgggcgacctgctcgacgcctgcctggagcatttcccgcccgcggatgcggacgatgcggacgcggactacacccgcgtcgccgtcatcggcaagccgaacgtcggcaagtcctcgctcgtgaacctcatcctcggcgaaaagcgcgtcatcgtcagcaacgtcgccggcacgacgcgcgacagcgtcgacacccgctttgagaacaaatacggcaagtatatctttgtcgataccgccggcatccggcgcaagtcccgcgtggacgaccgcattgagaaattctccgtcatgcgcgccaagctcgccatcgagcgcgcggatgtgtgcctgatcatgatcgacgcgcgcgacggcgtcacggagcaggacacgaagattgccggcctcgcgcacgaggcgggcaaggcgtccatcatcgtcgtgaacaagtgggacctggttgacaaagagaccggcaccatggaaaaaatgcgcaaggacgtcctgcgcgacctgagcttcatgtcctacgcgccggtgctgttcatctcggccctgaccggccagcgcaccgagcggctgttcgagctcatcaactttgtcaacgaccagagcgccatgcgcatcaccaccggcatgctcaacaacgtcctcgccgacgcgcaggcgcgcgtccagccgccgacggacaagggccgccgcctgaagatctattacatgacgcagacgggcgtcaagccgccgtgcttcgtcgtgttctgcaacagccgggagctgttccatttttcctaccagcgctatctggaaaaccagatccgcgccgtgttcgggctggagggcacgcccatccgcatggtcatccgtcagaagggggagcaggaatgatccccggcctgctcgcggccatcgccgttttctcctacctgctcggcgggctcaacggggcgatcatcgcatcgaaatacgtctttcaccgtgacgtgcgcgattacggcagcggcaacgccggcctgacgaatttcttccgcacgttcggcgcgcccggcctcgccatcgtcatcggcacggatgtgctcaagaccgtcatcgccgtcgtggccggcgggctcatcatgggcacgcagggcgcggcgtccacggggcaggtgttcgcgggcttttgcgtcatgctcggccacatctacccggtgttttacggctttcgcggcggcaagggcgtgctctgcgccgagacgatgctgctgatcgtgagctttccgaccggccttgtctcgctgctgatttttgtcggcatcgtctgggccacgcgctatgtgtcgctcggcagcatctgcggcgcgctcatcgcgcccatcggcgtgctcgccgcctgcggcaagctgccggcactgctgagcctgttttgcgtcattctgctcgtggtcaagcaccgcagcaacatcggccgcctcatccggcacaaagagtccaaactgtcttttaagaaagacctgtcagataaatttgacgacgaagatttttgaaacaaagagaagagggaatgaaacctatgcttgaactcaaacacctttgctttgaggccgaaacggacgccggtgtccgccagatcctcaaggacgtgagcctcacggtcgatgaacgcatggtcgtcatcaccggcccgaacggcagcggcaagtccaccatggccaaactcatcgccggcatcgagcagccgacctccggccagatcctgctcgacggggaggacatcacccacatgtccatcaccgagcgcgcccgccgcggcatcagcttcgctttccagcagccggtgcgcttcaagggcatcacggtctttgacctcatcagcatcgcctccggcaagaagctctcgacgaacgaggcctgcacctatctgtccgaggtcggcctgtgcgcacgggattatgtcaaccgcgaagtgaacgccagcctttccggcggcgagctcaagcgcatcgagatcgcgaccatgctcgcccgcggcacgaagatgtccatcttcgacgagcccgaggccggcatcgacctctggagcttccagaacctcatcagcgtgttcgagaagatgcacgaggcgatccacggcagcatcctcatcatttcgcaccaggagcgcattctcgagacggccgacaagatcgtcgtgctcgtcgacggcgagatccgcgccatcggcagcaaggatgagatcatgcccgtgctcatgcaggcgtcgagcgtgtgcagccgtctggctgacaaggtctgagggagggaatcaccatggatgcaattgagaaaaaactgctcgaagaggtcgccgacctccacggcatccccgagggtgcctataacatccgcgccgacggcaagctcgccggccgcaacacgaccgcgcacatcaacatcgtcacgaaggaagacaagcccggcatcgacatttacatcgcccccggcacgaaaaacgagagcgtgcacatcccggtcatcatttcccagaccggcctcaaggacatggtctacaatgacttttacatcggcgaggactgcgatgtgaccatcgtcgccggctgcggcatccacaactgcggcacgcaggagtcccgccacgacggcatccacagcttcttcgtcggcaagaacgccaaggtgcgctacatcgaaaagcactacggcgagggcgacggcaacggcgagaacgtcatgaacccgacgacgatcgtcgacctcggcgagaacgcctacatggagatggagacgacccagatcaagggcatcgactccacataccgcgacacgcaggcccacctgtcggacggcgccacgctcatcatcaaggaaaagatcatgacgcacggccatcagcacgcggagacgaacttctccgttgacctcgacggctatgattccagcacgaacgtcatctcccgctccgtcgccaaggatcactccagccagatgttcaactccaacatccgcggcaacaacaagtgcgctggtcactcggagtgcgacgccatcatcatggacagcggcaccgtcggcgcgcgtccggagatcacggcaaactgcgtcgaggccagcctcatccacgaggccgccatcggcaagatcgccggcgagcagctcgacaagctcatgaccctcggcctgaccgaaaaggaagccgaggagcagatcatcagcggcttcctgaagtgaggtgcgcggcgtgatcgagatcctctgtttcggcgacagcaacacctatggcttcacgcccgactggaagcaccgctacgggcgcgacattcgctatcccggcgtgctgcagaccctgctcggcgacgggtattacgtcgcggaggacggcctggtcggccgcacagcggcctttccggacagcaaccgcgacgggcgctccgcgctcgagacgctgccgctgagcatcgagagccacggcccggtgcagtacatcgtgctcatgctcggcacgaacgactgcaagatcgacaagacccgctccgccgaggacgtgggcgccggcatggacaagctcgtgcggctcgtcatcggcatgctgcccgcgtggacgaagatcctgctcgtggccccgccgccgctcggcccggccgcgccgcagcgcgacccggagtatgacgcgcagtcgctcgccgtctcgcagggcgtggcggcgcagtatcagatgatcgccgaggcgtatggcctgcggtttctggacgccggcacggtcacgcagatgagcgcgctcgacggcgagcatctcgaccccgacgggcacaagaagctggccgccgccatcgcggatatcgtccgccgcgactgcgaggcgtgagcgcgcgggcgcacagacaatgcgaaagaaaccctctgcgcggcgcccgaatcgccgcgcagattttttcgcggaaatgcaaaaacgttcttgacattcgtgtcgttttctgatatgatacaccttgcctgtgggggtatagctcagctgggagagcgcttgaatggcattcaagaggtcagcggttcgatcccgcttatctccaccacgaaaatcctgtaatctttgagattacaggattttttcgttttcaatttttcgtgggcgctatgcaacagggtgtgaaataaatcgaaaaatttgttctatttcatactccgttgcacactctctgcacagtcctgtttatgggactggcgctctgatagtatgaaagtacagaggaaaaccggctttgggaaagaagaaatgatatgtggttttttgcgctcatatatcgctcatatatattattgttgggctggttcgtgagagctatctggagtttgttgctgcgcagtactattgcgatcaatgcagatggatggcggagcgtaagcgcaatgggcggctgcctgcagactacgaatggtgggggcgttagagcatgacgatggaattgaggcaagcagaagcactgctgacggagctggccgacggcgtcgacccgctgacgggcgagtgcctgccggccgacagcgtctgcaaccggccggagatcatccgcgcgctgcattgcgtgctgcggtatgtgtcggaccggccgaagcggtctgcaccactgcccaatgcgggcaagccgtggacggaggcggatgaagccgccctgatgcagatgtttgacgtaggctgttccatggaggagatgcaggcgcggtttcagcgcacaaatggcgcaatcgttcggcgtttggagcgcctcggcagacttcgccccggcgaaacaatgaaataaggaatccccggcgtgcggtgaataccgacgccggggattccttactatacatttatttgaaaaccgtgtcaggttttggccgcggacggcggagatagaaccgctgcagttctttgatcgtgtagttggtgccaaattggcgattgatgagattgcgcgccataccccagttccagccgtgctcgccaacgagccggtacaggacgtcgcgtatttcgggctgcatatcgggtcatcctttctgattctgaaagtttcccggccgcatgatccgcggcggtacagcgccggcaggaaatgtcccgaagtccggcactgcagctaggagaaaagatagcatatttcaggcgaaaatgcaaggaaataacaaaaaatcttgtatagatgagataaagatttgcaaaaatccccggccgacgatttttccgtcggccggggatgcgattttgtgccgccgcggttattttccgagggacttgacccagtcggtgacttcctgctgcgtgacggcggaggggaagcgctggccctcctgccagtcgccggtgccggcgagcgccgcgagctgcgcgccgctctcgccgatgccgctgctggcggaggtgcagaagggaatgaccgtcttgccggtgaagtcattggccttgacgaacgtgtccacaggccacgcggcgatgccccaccagatcgggtagccgatgtagacggtgtcatagtcggcccagttatctgcggtcgtggtcttgagcgccacgtcgcgcagggtctcgtcgtcatgctcgcgcgagacgcggctgtcggcgttgttgtagtccaggtcggcgctcgtgtacggctcggccggttcgagctccagcagatcgccgcccgtcgcggcggcgatggcctcggccgcggtcttcgtgctgccggtcgcggagaaatagacgacgagcgtcttgccgccggcagcggcgggggccgtggtggcctcgggcgctgcggtcctgctgccgcaggcggcgaggctcagcagcatgattgcgccggtcagcacggggatgagctttttcatggcgatgcctcctcagtcgtggatggccgcgatccagcggtcaatggtcttgtccggcgtgcgcagggtcgtgtcgtcgaagtgcacgtcgaggcccggtttcacgtccgcgcccgggcacagcgccgccacgtccttgagcgtgcggccaagccagccgccgttcgtggcgaaggggtagacggtcttgccaccgaggtcgtgcgcggtcaggaacgcgcgcgtggccggggcgcaggtgtaccaccagacgggcgtgccgagcacgatcgtatcgtagcggtcaaggtcgatgtccatcgccttgagctccggcaggaagccgcgcttgacctcctgctcgccctgcgcgaccacatcgtcatatgagccggtgtagggtacgacggtgtcgatgcgggcgatgtcgccgccgatggcgctgtggatgcgctcggcgatgcgctgcgtgttgccgcggtaagaataataaagaatgagagatttcatattgcttacctccgtattgcatattgttttcaggttaccgtcatcatacagcatgaagctgactttaggtcaagatggtgaaatgtaaatttttcttgaataaggcgaaagagtgtaaaaagccccgcaccggtatggtgcagggctgtgtgatttttatcccagctggtcgagctctgcctgccacacggcggcgcaggcgtcgctgggcatgcgccagtcgccgcgggggctgagtgtgaccgatccgatcttcggcccgtcgggcaggcagctgcgcttgaactgctgcgcgaagaagcggcggtagaaatttttcagccagtgcagcagcacatcgtccgggtaccggtcgccgagcgcatggcgcgccagccggtagatcttcgccgggccgaagccgaagcgcagcacgtagtagaggtaaaaatcgtgcagctcatacgggccgacgagcgactccgtctgctgggcaatctcgccgtttttgttcgccggcagcagctcgggactgaccggcgtgtcgagaatgtcgagcagcacggcgcgcagggcctcgttttccgccgcgtcggcggcatagcgcacgatgtggcgcacgagcgttttcggcacgtcggcgttcacgccgtacatgctcatgtggtcgccgttgtaggtcgcccagccgagggccagctcgctcagatcgcccgtgccgacgacgagcccgcccgtgcggttggcgaggtccatgagctcgagcgtgcgcacgcgcgcctgacagttttcatacgtcacgtcgagcgcggcttcgtcctgcccaatgtcggcaaagtggctgtggacggtacgtgcgatcgggatctcctgaaatgtcacgcccagctcctcgcagaggatctcggcgttcgagcgcgtgcggtgcgtcgtgccgaagcacggcatcgtcacggccagcacgtcctgtgccgggcggccgagccgctgcatcgcgcgcacggccacgagcagcgcaaggctgctgtccagcccgccggagatgccgatgacggcggtcttggcgtgcgcgtgggcaatgcgcttggccagcccgtcggcctgcatggcgaggatgagctcgcagcgctcggcgcgggcggcatcgccggccgggacgaacggcgtcggcgagacgggccgcgtgagctgcacctcccgcagcggcaggtggaacacgaccgtctcgtatcccgcgctctcgggctggaacgtcgtgctgcggcagcgctcgctgaccatgcggccgaggtcgagctccgtgcaggcgcagcccgggccgaagggcttcgcttctgccagcagcgcgccgttttcgcagatgaggtcgtgcgcggcaaagaccatgtcggtcgtggattctccgtggccggcgtcggcgtagagatacgtgcacagcagccgcgccgactgctggcacacgagcgcgcggcggtagtcggccttgccgatcgtctcgtcgctggccgagaggtttgcgatcacggtcgcgcccgcgagtgcgtggtgcgtgctcggcggcagcggggcccacagatcctcgcacacctcggccgcgaggcaaaactccggcatctccgcgcagcgaaacagcagctgcgtgccgaacggcacctcctgcccggcaaagcgcagcgtgcgcacgccggcgggtgcggggttgaactgccgcttttcgtaaaactcgccgtagttcggcaggtgcgttttcggcaccagacccagcagcttcccgtggcagacgacggcggcgcagttatagagcttgccgtccaccgcgacgggcaggcccacgagtgcgacaaggtcgagcccagcgctcgcctccagcacggcggcgagccctttggccgcggcgcgctggagcggctgctggaaaaacaggtcgccgcacgtgtagccggtcagccccagttcggggaacaccgccagctgcgcgccatccaacgccgcgcgctgcatggcggcgatggtctgctgtgtgttgaacgcgcagtcggccacgcgcagcgcaggcgagaccgtgcaggctttgagaaaaccgtggatcatgatgttatcaccctttcaaaaagcaaaacccggagcgcaaagcgctccggacggcgcggcaaatttgcccgcgccgcagatcggaatcgaggcgggccttgccccctcgagctcccccgctgctccggaatctgcacagcgggaaatgcctttttgtgatctgaaccggcaaaacccggagcgcaaagcgctccgggttttgcggatgctatatcataccacggttgtagggggaagaacaagtggcggtatgcagaaaatgtgtgccgggaagcccaaaatcacgggttttgtgcacagtcggcgtcgagtgcggcgtattccgcgtccgtgacgggctcgcaccattcgttgctcgtctcctcgccggggcactcgacggcgatgtggctgaaccagcagtccttctgcgcgccgtgccagtgcttgaccccggccgggatggtcacgacgtcgccggggtgcagggcctgtgcgggctttcccgcctcctgataccagcccagaccgtccgtgcacagcagcagctggccgccgccggacttcgcgtggtggatgtgccagttgttgcggcaggcgggggagaaggtgacgtttgcgaggaaaacggtcttcgtcgggtcggtcagcgggttaaggaagctctcgccggtgaagtactgcgcgtaggccgtgttcggctcgccgaggccgaagagaccgccgtttgcgtccgcgctgccgtcggcgtagacctccttcgcctgccggaaggcggcccaggcgttcggccagccggcgtagaaggcgaggtgcgtgaggagctcggccatttcggccttcgtcacgccgttttgcttcgcggtcgtgaggtggtaggtgagggagctgtccgtgatgcccttgctgatgagcgccgtgatcgtgacgatcgagcgcagcttgagcggcagctgtccctcgcgcgaccagacctcgccgaagagcacgtcgtcattgagctcggcaaatttgggtgcaaaatcatgcagggcgtctctgcccgcagtctgtttgaccatgatgatacctccttatttcagatactgacggtaaaatgcttcgatgcggtcgaacgggatgatgtccattcggtcgtagagatcggtgtgcacagcgccggggatgagcagcagctccttgttgccgccctgcagccgggcaaaggcgtcgcggctgaagtagcacgagtgcgccttgtcgccgtggatgacgagcacggcgctgcggatctcatcggcgtaggcgagcagcttcgcgttgagcagcggcagcggggacgtgacgttccagccgtcggtggagttgagcgagcgcgggtggtagccgcgcggggtcttgtagtagtcgtggtagtccttgacgaaaaacggcgcgtcgtccggcacggggtcgaccacgccgcccgcgcgctgatacgtgccggccttgtagtcggcggtgcgctgcgcattgagtgcctgacgcagggcataacgggcgtccggattgtcgtcggcgtcaaagtagccgttggcggtcacacgggtcatgtcgtacatcgtggacgtgacggtggccttgatgcgcgtgtcgatggcggcggcgttgagcgccatgccgccccagccgcagatgccgaggatgccgatgcgctccgggtcgacatcatcgcgcacggacaggaagtcgaccgcggcggaaaagtcctcggtgttgatgtcgggcgaggcgacatagcgcggcgtgccgccgctctcgccggtgtacgacgggtcaaaggcgacggccagaaatccgcgcgcggcgagctcctgcgcgtacaggccggagctctgctccttcaccgcgccgaacgggccgctcacggccacggcggcgcgctttccggcggcgtttttcggcttgtaaagatcggccgcgagctcgatgccgaagcggttgtgaaacgtgaccttgcagtggtcaacggcggcgttttgcgggaacgtcttgtcccattcccgggtgagggtcagggtgctgttcatggttatatacctcctgtatcggttttatgcgatggctgcgcccatggcgcgggcgggctcaagtgcggggtggccggcgatcgcgcccggctcggtcacgccgccggcgaacaccgtcccggcgaggcggcacttttcgtagcacgcgatccagccttcgagcccgtggatggcgcgctcgtccgtatccggctcgtcctcggtcgccgaggcgagcaggtaaatgtcgcggaatgcgtagtccgacgggaaaagggcgttgacacggccgctgtgatctgatatcctaagcatacaacctgaagctgacttcaggtcaagcattttttcgcgaatttttttcgaggtgatcccatgtatacgatcggacaggtgtcggagcagtttgatctgccggtctccacgctgcggtattatgataaggaggggctgttcccggcgctcacgcgcacgtcgggcatccgccgcttcggcgagcaggagctcgaggcgctgcgcgtgatcgagtgcctcaagcgctcggggctggaaattaaggagatcaagcagtttatggaatggtgtgcgcaggggagcgagacgtacccgcagcggcacgcgctctttgtgcagcaggccgagcgggtggaggcggagatcgtgcgcctgcaaaaatcgctcgacatgatccgcttcaaatgctggtactatgagcaggccatgcgcgacggcagtgaggaccgcgtgcacgccatgctgccggaccatctgccgccggatatccagccaatttatgaccacgcgcacgaaacgtaatcctaccattttgattcagaaaggatggcgacccatgaaacagcgaacgatcctctcgacccttctgttctgcgcgctgctgctggcgggctgcggcacggcggcgcagaccccggatgcgacgccaacccccacgcaggaggcggcggccacgccgacgccgacgccagacctgctgagcaccctgccgtatacggacggccagctctatgccgcggcctacctcggctatcaggcaccgacggatctggacttcttccagcagacgtatttcggcggccgggagctgccggtgcaccacatctcggacggggacttttatctcatcatcccgcgcgacccgaacgcgactgtgcgcctgtacaaaaacgatatggtcaccgactccaaaacgctcttttatgagcagacgaacggcgatgccttcgtcatcggctgcaacgtcagcgacattttcccggacgtgacggtctcgatcacgtcgggcggcgagacggtggacttttcgccgtatatctcgctcaaggacggcagcgtgcaggtcggtgcgcgcgggctgaacatcacgcgcatctcgacctcgtcatgacgaattgagaaaacgaccccgggtgcgatctgcacccggggccgctggtttatctgaggttatgcgagcgtcagctctgtgctcgcgcacacggtcgcgcccacgcgctgcatgtcggcgaggttgcctgcctgcacggcgtcggtgacggacgatgtgcagtccgagagcacgacggcgtcatagtcgagcgagatggcgtcatagcacgttgtgcggatgcagttgggcgtggttgtgcccgcgagcaggacggtctgcacgccgagccggcgcaagatgaggtcgagccctgtgtggaaaaacgctgagaaccggggctttacgagcacatagtcctgcggcaggacggtgaatgcgtccggaaacgcatccgacaggtgtgcggcgcagtcctccgagagcggcttgccgccggaagcccacgcggccgcgcgcggcttttccacgtctgtgccgtcggcccggtagtggcgcacggcgtagatgacgggaacgcccgcttcgtggcagcggccgatgagcgccgcgcacgcgggcacggtcccctccgccgccgggatgcacagcggggacgcgctgtcgagaaagccccgctgcatgtcgatcatgatgagtgcctgtttgggcatggcgctgcctcctgatggttgagatgctcccatgatagcgccttgcgccggatttggcaagcgcggcttgccatccgcgccccgatgtggtatcctaccgggtagccccaaaagggaggggcactctttacaagcgggagcgaacaacatgagcagacaactcgaaccctatcagctgatcgaacgcagcatccagaaaaaattccacaaggtgctctggacgccgttcatcaccgccatcaagcagtacgaactcatcgcccccggcgaccggatcgcggtgtgcatctccggcggcaaagactccatgctcatggccaagcttctgcagctgctgcagcggcacagcgacgtgccgttcgaggtcattgatctcgtcatggaccccggctacaacgccgtcaaccggcagaagaccgagagcaatgcggcgctgctgcacatcccggtcacgatctttgagacaaacattttcgatgtcacgagcggcatcgagcagtcgccgtgctacctctgcgcgcgcatgcgccgcggctatctctacagcaaggcgcgcgagctcggctgcaacaagatcgcccttggccaccacttcagcgacgtggtcgagacgaccgtcatgggcatgttctacggctcgcagctgcaggccatgccgccgaagctgcgcagccgcaatttcccgggcatggagctcatccgccccatgtactgcatccacgaggacgacatcatcgcctggcagcgctataacggtctggagttcatccagtgcgcctgccgctttaccgagcgcgcggctgcgcacggcagcgacggcagcagctccaagcggcaggaggtcaagctgctgctgcgcgagctgcggcgcacgaatcccgacattgaaaagagcattttccacagcattcactccgtctgccttgacaccatggtcggctacaaatccggcggtgtggagcacacgtttgccgactgctaccgcgagcgcggcgagatggccgagatggaaaaggaggacgcggaatgatgcccatcgagcgtatgcgcccggaggactttgacgcggttttccgtttgctggcccggagcttcccggccggggagcggcgggataaggcggggcagcgcgcgctgcttgcggacagcgcctatcagatcgacattctgcgcgcgccgtccggcggcgtgcaggcgctgatggcgtcgtgggactttggcggctttgtctttttcgagcactttgccgtagaccccgcctgccgcaatggcggcatcggcgggcagatgctcgacgcgctgctcgcgcgctttgataagcccgcctgcctggaggcggagctgccagagacggagctggccgcgcggcgcatcgggttttacgagcggcacggctttacggtcaacgcggattacccttacttccagccggcgctcacgccgggcggcagcccaatcccgctgcacctgctcacgaccggcggcgcgcgcacgcccgccgagctgcgcgcgatcgagacgctcgtgcacacgcgcgtatatgggcaaacgcccgcagcgatggtataacagaaaacagaaagtcagcacacctctgcacggaaggggcaggggcgtgcccatgttgccgccgaagctgtccggccctctgccgccgaagccgctctggtctgcgccgcccgcggcgctgagcccgtcgtcgctggagacgatgtcgatcgtgccgccggagacggtcacattgccgttcgcgtgcgcgccggtgagcacgtacacgccgccgtccgtgatggtcacatcatcgctcccggagatctctaccgggacggtttgaaaggagaaaacgcatgaagtctatccgtatcctgacccttttgctcgcgctcgtgctgctgtgcacgggctgcgccgccggcggtgcggcggaggccacgcccgccccggacatgagcgacctcccgctcgacgggggctatgcctacctgcgcgtggaggtgctctcgcgcgacaaggacgcgaaaacgctggaagtgaaagtgctcgatttcggcgacgccgacggtgtgaacgtcggcgcgctcccggtgggcgcgcagggcacggccgattgttccgacctgctgtcgatggcgatgatgatcgactccggcgagtggatcatcacctacgcagacctcgggcagcaggcgttcccgctgcggctgacgtcgatcgagaacccggagcactttgccgagcgcgcggggaaataaaaagcaccggctgagggtttcctcagccggcgttttcgtcaccagaactttttcttcttgcacacccacaggctgatgcccacggtcacgatgctcacgatgatgacgacggggtagccgtacttccacgtcagctccggcatgccgacaaagttcatgccgtaccacccgacgagcagcgtcagcggcaggaagatcgtcgtcacgatcgtcaggatctgcatgatgcggttttgccgcgtgtcgatctcggcctgaaacaggctctgcagctgtgcgcacgattcgcgcagcagctgcgactcctcgcgcaggcggatgacccggtcctcgaacatgcgaaacatcagctgctcgctgtcggtgaaaaagccgttttcgttctcgtgcagctcgcacgccacgtcgtcgagctgggagtaatagcgaaaccacgccatggtctccttgcgcagcgcggtcatcggcgcggagaaatcgtccagctcgtgcgccagcacctgatcctcgagcgcctcgatgcggtcctcgatcttttcgagctggtgcaggtcgcgggcgatgagctgctcaaaaaagtcgtagagaaaccggccgacgctaccgtcggtccagcgcttttcccgggcgatgcggcgcagcagcccctgcagcgcattctcgtcgtccacgagcacgacgcgcgtggccgtgacgagatagccgcaggcgagcggcttgccgtccttgccctggcgcggcagcacgagcgtgcctgccagacagtccgagcgcacctcggccttgcacacgcgcgcgtcgcgcgccgggggcgtgtggtgcagcgtccgctccagaccgggcagcgccggctggtgcgacagctcttcggatgtcagcagcacgacggcgggctgctccggcgcgggcgcgtgctcctgctgcgtgagcgtctgcccgatggtataccaatacaaatgcggtccctcccataagtcgcggtgttttccccattgtagcacaccgggcgcgcggacacaacgtccggctggaaatcggggcgcgggtgtgctatactgggcaaaaatcatactttgggggaagcaccatgatcgtctattacaccggcaccggcaacagccgctatgttgcccagcgcttcgccgccgccctcggcgatgatctcatcaccgcgaacgaatgcatccgaaacgacacgcccgccgacctgcattccgaccggccgtgggtgttcgtctcaccgacgtacggctggcagatcccgcacattttcgcggactttctccgccgcggccgcttcaccggcagccggaaggcgtattttgtcatgacctgcggcagcgagatcggcaacgccggcagccgcatcgcggcgctgtgcgcggatatcgggctcgattatcagggtgtgctgcaggtcgtcatgccggaaaactacgtcgccatgttttacgtgcccggcgcggaggagtcggcgcagatcatcgcggcggcgcagccgtccatcgacgggggcattgcctgcgtgcagcgcggcgagccgttcccggcgccgaaggtcggcccgctcgaccggttcaagaccgggccggtgaacacgatcttttatcggtggtttgtcaagtccgggccgttcacggtctcggatgcgtgcatcggctgcggcaagtgcgcactgagctgcccggtcaacggcatcgacatcgttgagcgccgcccgcactggaacggcgcgtgcacgcactgcatggcctgcatctgcggctgcccggtgtccgccatcgagtacgggcataagagtcagggcaagccccgctaccagtgcccggaatataaataagaaacgatccctgcgccggacttccgacgcagggatcgttctttttacagatagcactccggccgccgctgcctgaggtacgggcgcttttgctcgcgccagagccgcgcctcggcgaggtcgagctcctgcacgatgagctgctcgcggtcgtcggccttatagatcacgtcgccgctcgggtgcacgatgagcgactcgccggcgaagtccatcccgtcctcgcgccccacgcggttgcacatggcgacgaagatctggttctgcatcgcctgcacgcggatctcccactcgaagagctccatgggttcggcttttgtgttcgccgtcgggatgatgacgagatccgcccccttgagcgcgcacgtgcggatgctctccggcaggtgccggtcaaagcagatcacgatgccgacgcggccccacggcgtgccgaacacgagaaagccctcctcggacggcgtgtagtagtcgcgctcgtaaaactgcgccgcctgcatgatgtgcaccatcttggccacgcccgcgcagttcccctccggcgtcagccagagggaggcgtcgtagcgccggccgtcctgctcgaggtacatattcggcgagaggtagaacccatgcgcgcgccttgtccgcgaaggcccgcaccgtcgggctgcccgccgggacgacataggcgtccacgttccggcccgcatactgcgggaagaacggagtgagctgcacctcggggaaaaacagcaggtcgctgcccgcggcggcgtcgcagaaggcgagggatcttttcaggttttcgtccatgctcccggtcatggacatctgcgccatggcaagcttcatacgcgcgctccttttatgcgtcctgcacggtcaggcgcagcacgtccggccgcgcgtagtggccgcacacgtcgagctccatgcggctcgcgggcacgcgctgcatatcgagatcggcgtagagaatgtcctcgctgtcccacaccggctgcacgacatagtgcccgtaggggtcgacgatgcagctgccgccgcggcagggaatgtcgttcaggcgcgcgatctcatccgggcagtgcagcccggtggggtagtccgcgcggtgaaagaccatgtcgcagttgatgaaatagcaccggccctcgagcgcgatgtgctgcacggtggcctgccactcggggttgtcgttcgtgttcggcgagatgtagagcgtcacgcccttttcatacagcgccgtgcgcgccagcggcatatagctctcccagcagatgaggctgcccatcgggccccacggcgtgtccacgaccgggaaatacccgcggtcggcgtcgccccagaccacgcgctctgccccggtgggcttgagcttgcggtgcacgggggcgagcgtgccgtccgggcagaagatgagattggagttatagagcgtgcccgtcacgccgtcgcgctccgacacgccgatgctcacatacgcgcccgcggcctttgccgccgcggcgaggcgctccgtctccggcccgggtacgacaatggagttgccgcagtacagctgccagtccttgcggccgtcttcattgcgcgcgccgaccgtgaagccgaacgtcatgccgtacgggtagccggggatgaacagctccgggaacacgatgagctctgcgccatgctgcgcgcactccgcgatcaggcgcacggccttgtccgtgcacgcggtcttgtcaaacagcaccggcgccgcctgcaccacggcgatgcggcacgtcggtttgagatctttcatatgcctgcctccctgaaagtgttttctgcccttaaaataacacggctttgctgggaattcaagacgcaaaaagtctcgcagcgtttgcgcctgtacgcaaaaacgcccgcacatcgtgcgggcgttttcggcagcttttcaaagacctcgtagagtttcgccgccgcagcggcgaaagaaagtctgatcattttctccggcgacatgcgcggcggagaaaataccgctcggctcgcaaacgtgcgcgcacggcgcgtgcgctgcagcgagccgcgatcttttcaaacgagagcccaacgcagtgggtctcgtttgagcgtgtcaaaactctgtttgacacgcaaaaacgcccgcacggtgtgcgggcgttttcggcttggcaattttcgcaaaaggcttcaggcagccctggtcttatccgggacgatcttgtgcgcgatcaggcacaggagcatcgtgccggccatgtcgggcagggtgttgccgaccgggatgtccacggtcatgagcacgcggtagagcacgaagcccagcacccagacgacggcgttgcacacatcgagcctgccgctcacgccgccgcgtcggagcaggaagaagtccgtgatctggatggcgatcatcggcgcgaacaccgagccaatcaggtacaggaagttcgtgatgtcgtccatcgggaagcagatggcgcagaccgtgccgatgacggtcacgatgagcgcggcgtacttgccgttgatcttcttcgacagggactcggcggagatgccggcgctgtatgcatcgaggaacgtcgtcgtgacggtcgagaggatgaggatgagcagcgcggccacgccgaggccggccttgaccatgatgagcgcaatgtcgccctcgccggtgaagatggcggcgcccatgccgatgacgtacatccagcagctcacgacgccgtaggtgagcgtgctcgagagcgtggcggcgaagggcttttcggcctcgcgcgtgtagtcggagatgagcggcagccacgacagcggcatggccacggccagctcgaccgctgcgccgaagctcaggctatcgtccggcgcggtgacgggcgtgccgccgcggaacaccaccacgcacaacacgatcgagaggatgaacagcgccgccatggcgatcttgttgatccagctgaggttcttgatgccgacggcgatccacaccacgatgagcccgccgatgacgagacaccacacccacttgccgatgccgagcacggtgttcgtggccagtgcgccgtcatagatcatgatggccgtccagccgacgagctgcagcacgttgagcgcggcgaaaaacaggcagccgatgcggccgaagctcagctcgaccgtgcccatggcgctgcggccggtgcggccgccgatgaggcccgcgaagaagaacatcgcgcagccgatgacatggccgacgaggatggcgagcaggcccttcgtgaagccgaggggcgcaaagtacgtgcccgtgaggatctccgcgatggacacggccgcgccaaaccagatgaggctgttctggaagctggaagtctttttcacgctcaggcctcctgccggtattccggcttcaggtcgaacgcatggtccatcgggccggagcccgcgccgaggtcgagcatggcggccagcgcgccggagagatagtccttcgcgcggcggacggccgtgtcgagatcaaagcccttggcaaggttggccgcgatggcgctcgagagcgtgcagccggtgccgtgggtgttggggttgtcgatgcgcttgccgttgaaccactcgtagccgccgccgcggtacaggaggtcgttggcgtcgttgagccggtgtccgcccttgcacaggacggcgcagccgtagcgctcgctgatggcttttccggcggcgatcatgtcgtcgggggaggcgatggtcaggccagagagcacctccgcctccgggatattgggcgtgagcacggtggcaagcggcagcagccgcgcctcgagcgtggcgatggcgtcctcggagatgagccgcgcgccgctcgtggcgaccatcacggggtcgacgacgatgttttgcgccgcgtagtgctgcagccgctcggcgatgacctcgatgaggccggaggacgcgaccatgccgatcttcaccgcgtcaggccggatgtcggtaaagacgctgtcgatctgctggccgagaaatgccgggcttacttcaaaaataccctgtacgccggttgtgttctgggcggtcagcgccgtgatcgcactcatggcaaatacgccattcatggtcatggctttcagatcggcctgaataccggcgcctccgctggaatcgcttccggcgatcgttaatgctgttttcatattctgtctccttttcagcatcaattttattgagcgacggaaagtggtgcccccaatctgccgctgtttgtatgtttgtctgcgcccgcgcgcagggagttacaggtccagcgccgtgcgcacggcggctttgagcgcgcgcgtggcggcgggaatgtccggctgcgcgaagatcgcactcacgacggcgacgccgacaatgccgctgccggagagccgggcgacattgtccttcgtgatgccgccgatggcgatgaccgggatggacacggccgcacagatctcgcgcagggtatcatagctcacggcgttggcgtcggccttcgtcccggtcgggaacacggcacccacgccgagatagtccgcgccctcgcgctcggccagcagcgcttcttccaccgtctgggccgacacgccgaggatcttgtccgggccgatgagctcgcgcaccttgccggccgccatgtcgctctggccgacgtgcacgccgttggcgtccgtggccacggcgagcgccacgttgtcatcgagcacgaacggcacgccgtactgtttgcacagcgccttgagcgcgatggcctcctcttgaaaatgcgcctcgtcgagttccttctcgcgcagctgcaaaaacgttgcgccgccctgcagcgcctgctcagcctgttcatagagcgtctggccgtgcagccacgagcggtcggtcacggcgtagagcagcagagatgcgttatcgcagttcatatttggctcccttctccagcgcgtcgccggtcatgttgaaaatcgcgtcgatgatgcggttgcggtaggtgctgttgccgtcgccgggctgcatgttggcccagccgatctcgcctgcgagccccatcatgcacacggcggccgccgcggcgtcgagcttgtggtcgggattggcgaccagaaacgccgtcatcagcgccgagagctggcagcccgtgccggtgatgcggctcatctccgcgcggccattgcggatgcaccagcagcgctcgccgtcgctcacgaggtcgatcgcgccggtcacggcgacgatgcagccggcccgctgcgcgaaggtcttgacgagctgcacgccgtcgtcgagattcgcctccgtcacggcgtcgaccgcgtcagcgtccacgcccttggtgctgccgctgccggtgcagagggtcttgatctcggagatgttgccgcgcacggcgtcaaagcgcacctcctgcatgagacggttggccgtgtcggtgcgcagacggctcgcgcccgcgcccacggggtcgagcaggacgatgtggcccagctcgtttgccttcttcccggcgaggaacatcgacgggatggtgtttttgttgagcgtgccgatgttgatgttcagcccgccgcagatgctcgtgatgtcctcgacatcgtcggcatcgtcggacatgatcggcgagccgccggccgccagcagaacgtttgccacgtcgttgacggtgacgtaattggtgatgttgtgcacgagcggcgttttcgcgcgcacgttttccagcatggtcttgagcacttgttgcataaatcatgactcctttcccgggtgatctgcacgaaaaaaacagcggcgcccgtaaagagtgctgctgttgcggtccggcagtatgaatccctacgttggcattgtccaaatcaggtatgcgggtctaagcggatgcttactctcagccgagcggctccccgtgtttgttcacttcatgataggacgaaaccgccggcttgtcaaggcaggaatgtaaaatcttcaccgctttgcggcacgggaactttacatggctgcggttttagactttacacgcgctgtgtaaaacagaaacgtgagcttgtaagagccaaaatcttgaatgttacaggaggaagagatgaaccattccaaacgcatcgggtcccgcctgctgccgcccgcgctttttcgcatttgctgctgtattttggttgcaatcgggcctccggcatgatacagttaaaatgccgtgttataactgcttttacacaagggcggctgcagattttacacggtgaggaaggaatacagttgtgcggcagggggccgtgcaatgttgtaggaatctaaaaaacaggaggaagaaatgaaaaccagaatgcacaatggaagcagactgctgtcgctgctgctggcggtagtccttgtcttcacactgacggttccggctcttgcggcggacaagccgcaggacatgaacctgaggatcgccgtcatgtccgacctgcattatctctcgccggatatgattgcagacacggcggactttgagcatgcactcaacagcgaccgcaagctgctcaaggagagctccgcaatcctgtacgaaaagtttgagcaagtccgcgcggacaagcccgacatccttctcgtgtccggcgacctgaccaaggacggcgagcaggagtgccacgcggcgctggcaaagcagctgcagcagctgcagcaggatattccggggctgaagatctatgtcatcaacggcaaccatgacatccgcaattacaatgccaagaacttcaacacccccgacggtaaggccgtgcctgccacgcgcacgcacccggaggacttcaagcgtatctacgattttgtctactccgatccgaccgtcatcgcgaccttcaccccggccgcgggcaatgaggccggcggcctgtcctatgttgcgcgaccggtcgaggggctgaccattatcgccatggacacctgccgctacagcaaggagaacacctccaacggcacggatgagcatgagacgagcggcgctatcagcgccgatctggaaaaatgggtcatcgagcagactgccgccgccaaggcacgcggcgaccttgtcatcggtctggagcaccacggtctggtgccgcacttcgatgtcgagcccaccatcctgcccatgtacctcgtcaacggctatgagcgcatcgcgcaggagtatgccgatgccggcatgagcgtcgtcttcaccggtcatatgcacgcggtcgacatcgctgccatgaccacgaaggccggcaacaccttctatgacatcgagaccggctctgcgctgacgtatccgtgcccggtccgctttgtcgatctgcgccgcagtaccgtcggcggtgagacgagcacctacatgagcgtgagcaccaagacgcataccggccccatccattacacagatcccgccacgggtactgcgcatgtgatcgatgacctgaccgagtatgcccgggaattcggcttctcgaccgatatgctcaagacggtcgcgggcgacttcgtcaagtccttcttcggcaagtatctgccgaatgacacctggccggtcacgaagatcgtggcgaacatcgaccaaatcattgacgacgtggccgccgtcccgatcgcggacggcaaggacctgctcgactttgccaactggatctatcagtgcaacctcgccggtgaggacgacggcaattatcccgcttgggtgcagtccggcgtcgaccagctcaagagcggcgcgctgctcgatcaggtgctcaacatcgttgccagagatgcgttcggccgcggcagcgtgctcttcacgaagttccagggcctgttcacccgctatctcaagagccagctcaacgacctgctcgtgaagatcgtcgtctccatgagcgtggacaacaactgccccgacgacaatgacaagaccatcctgctcgagggcagcagtgcgcaggtgcgtctcctgccggtcaccggcagcagcgccgccgttacgcaggcgtacgtacagggcagcaccgcgacggtgttcctcaccagccgccagctccgtgcggccaccaatgcgcagtccggcgcgaccgtgacggtcaacgccacagatcccgtggccgacacggtcatcctggccggccgctcgatcgccaatgcgcgcagcgcgggtgttgcggccctgcaggtgcagctcgcagccggcaccgttacgctggatagcgacgcgctcgcggcgcttgacctgcacaaggacgtggccgtctcgctcacgggagcgtcgctcaacgctgcgcagcagcgtgccctcggcacgcaggccgctacggcgacgcttgccaatgcctccgtcatcgttgacggcgcggcggaaagctaccccgccggcagcgtgcgcgccagcattccggtgcgtgcagcggatgcgctcaccgcgtggagccttgccgaggacggcgccatctcggccgtcggcggtgcgtgggatgcgcagcagcagacctatacctttgatgttgtctccggcgtgacggccatcgcgcgcttcccgttcacggatgtgcccgccggcagctggtactacggcgcggcggcctatgcctacaacaacggcctcttcgacggcacgtctcccacgacgtttgccccgaacgcggtcatgtcccgcgccatgctcgtgaccgtgctgtggcggctcgcgggcgcgcccgcgccgaagggcgtcaacacgttttccgatgtgccgggcggcacatggtacacggacgccgtcacctgggcggcggaaaacggcgtggtctccggcatcggcggcggctgctttgctcccaacagcaacgtcacgcgcgagcagacggccgtgatcctcttcaactacgcacacagccgcggctatgacgtgggcgcgcgcgccgatctctcggcgttcccggacgccggcagcgtgtccggctgggcgcaggatgcgctctcgtgggccaatgcagccggccttatcaacggcacggtgtacggcggacggacgatcctcgacccgcagggcagcgcttctcgcgcgcaggtcgccaagatcctcagaagctacgccgagcacgtggtcaacgcctgatcctctttttgatatttctctcacagcacagcaatttcccggcgggggcggcatatgccgcccccgcgcactttttgcgcctgccgcttgggcatctgctgcacgccggggcgcaaaaaaatgcggaatttgtgaaaatttgcggttgacatttgcgcgcgaagtttttatactcgaaccatcaggatttttcatcagaatcggagcaaatatcatgaaccgtacctacttttttgcatacgcttattactttactatgacaatatagtaaggctgatttgtgatgcgaaaaatagctcggatcccgagaatgtttcatgcggcacaggttgagcctgtgccgcatttttcttttgaaaaacaaaaacaaaaattcaggtaaatacatcggaggtaatcatcatgatcgtcgtactcaaacatggcgtggaagcagcaaagcgtgagcagctcatcgactggctcaagggtcagggcctgaccatccacatttccgagggcgaataccagaccgtgctcggcctcgtcggcgacacgacccgcgtggacatggacctgatcgcgagcctcggtatcgttgacagcgtcaagcgcgtgaccgagcccttcaagtgctgcaaccgcaagttccacccggacgacactgtcatcgacgtgaatggcgtgaagatcggcggcggcaacttcgtcatgatcgccggcccctgctccgtcgagtccgaggagcagatcgtcgcggtcgcgaaggccgtcaaggcctccggcgcgaacatcctgcgcggcggcgcgttcaagccccgcacctcgccctacgatttccagggcctgaaggccaccggcctcgagctgctcaagatcgcgcggcaggagaccggcctgcccatcgtgacggagatcatgggcgtggagcacctgcccctgttcgaggatgtggacatcattcaggtcggcgcgcgcaacatgcagaacttcgacctcctgcgtgagcttggcaagctgcgcaagcccatcctgctcaagcgcggccttgccagcaccctcaaggagctgctcatgagcgccgagtacatcatggccggcggcaacgagcaggtcatcctctgcgagcgcggcatccgcacgttcgacgattacacccgcaacacgctcgacctcgcggccgtgcccatgctcaaggagctgacgcacctgcccatcattgttgacccgagccatgcgaccggcatcgcccgcctggtcgagccgatggcgctcgccgcgacggcctgcggcgcggacggcctcatcatcgaggtgcacaacgaccccatgcacgctctgtgcgacggcgcgcagtccctgcgcccggaggtctacgacgacctcgccaaaaaggtgcgcagcgtccgtgaggtgatcgcgaaatgacggtcggcatcgttggcctgggcctgatcggcggttcttttgccaaggcatatcaggaagcgggcgcgaccgtgctcgcctggaaccgcagccgcagcgtgctcgatttcgccataatgagcggcgcagtggacgccgagctcacggaggacaacatcgccgcgtgcgatcttgtgctcatcgcgctctacccggaggcgaccatcgagtggtttcgccgcatggccccgcacatcggagcgcaccccgtcgtgctcgactgcggcggcacgaagcgcaccatctgcgccgcgtgcttcccgatcgcaaaggaacacggcgtcacgttcctcggcggccacccgatggccggcacgcagtattccggcttcaagaacgcgaaggcgaccatgtaccacggcgcgccgatggtcatcgtgccgccggactttgacgatgtgctgctcttcgaccacgtcaagcagctgctccagcccgcgggctttgcgcgcttttccttcacgacggcggaggcgcacgacgagatgatcgccttcacctcgcagatggcgcatgtggtctcgaacgcatatatcaagagccccacggcgtcgcagcacaagggcttttccgccggcagctacaaggacatgacccgtgtcgcgtggctgagccccgagatgtgggccgagctctttctggaaaacaaggacaatctgctccatgagctggacatgttcatgacgcacctgggcgagtaccgcgacgcgatggcgcgcgacgacctgcccgcgctcacgcgcctgctcgatgagggccgccggcgcaaggaggaggtagacggccgatgacgaccatccacgtgactgcctcgcgcgactatgacgtgctggtgcagccgggcctgctcgacgacgccggcgcgcagatcgcgcgcgtgctcggcacgggccgcacggcggccatcgtcgcgggcgagaccgtggcgggcctgtatgccgggcggctcgcggcgtcgctcacgcgcgcgggctttcgcgccgtgacgttcacctatcccggcggcgagcactgcaagacgctcgccacctatgcggcgctgctgaactttctggctgcgcaccgcctgagccgcagcgacctcatcgtcgcgctcggcggcggcgtgaccggcgacctcgcgggctttgccgccgcgacgtatcagcgcggcatcccgttcgtgcaggtgccgacgacgctgctggccgccgtggactcctccgtcggcggcaagacggccgtgaacctcgcaagcggcaaaaatcaggtcggctgcttctatcagccgagcctcgtgctctgcgacccggacacgctgcgcaccctcccgccggaggaataccgcaacggctgcgccgaggtcatcaaatacgccgtgctgcgcagcgagccgttttttgacgcgctgcgcgcagagccggtcagcgcacaggtggagcacgtcatcgcaacgtgtgtcggcatgaagcgtgacctcgtcgcggccgatgagtttgaccgcggcagccgccagctgctgaacctcggccactcgttcggccacgcggtcgaaaaatgcagcgactacgccgtgccgcacggctgcggcgtggccatcggcatggccatcatcgcgcgcgcggccgccaaacgcggcatctgcacggacgatacctgcgcgcagatcctcgcgctcctgcggcagtacggcctgccgacggagacggcgtttacccgtgacgcgctcacggacgccgcgcgctcggataaaaagatcgccgacggcaagctgcacctcatcgtgccggagcgcatcggccgctgccgcatcgagacgatcccggcggcggatatccccgcctggctcgcggacggaggcattgcatgaatcagaccgtttcccccgggccgcgcacgggcagcgtgcgcatcccggcttcgaaatcgcaggcgcatcgcctgctcatctgcgccgccctcggcgcgcagcccgtggcgctgcggtgcgacggcgtctcggccgacatcgccgccacggcgcgctgcctgtccgccctcggcacggacatcacggacgatggcgcgggcacgctgcgcatcgtccccattgccggggaaatgcccgcgcacgcagatcttttctgcggcgagagcggctcgacgctgcgctttctgctgccggtcgtgggcgcgctcggcgcggacgtgaccttccacatggaagggcgcctgccgaagcggccgctgtcccccctcgacgcggtgctcacggcgcacggcatgaccatccggcgcgacggcgcgctgctgcacgccggcggccggctgcggcctggtgcttacgaactgccgggcgacgtgtcctcgcagtacatctccggcctgctcatggcgctgccgcgcctgccgggggagagcacgctcgccgtgacgggccggctcgagtccgcgggctacatcgctatgacggaggacgcgctgcgcctgtccggcatccgcctgcaaaagcgggagcggacgtacaccatctccggcggccagacggcgcgcctcccggcgcagtgccatgtggagggcgactggtcgaacgccgcgtttttcctgtgcatgggcgcgctctcgcccgccggcgtcacggtcacgggccttgcgtccgactcgtcgcagggcgaccgcgcggtgctggatgtgctgcgccgcttcggcgcggatgtgcgcgagacgcaggatgccgtcaccgtaaggcgctgcgcgctgcgcggcgtcacgatcgacgccgcgcccatcccggatctgatcccggtgctgagcgtcgtcgccgcgctcgcggacggccagacgcaggtcgtcaacgccgcccgcctgcggctcaaggagtccgaccggctcgagagcacggccgccatgctgcgcgcgctcggcgcgcaggtggaggtgcacgacagcggcctgaccgtcaccggccgaaaggtgctcaccggcggcacggtcgacccgcagcacgaccaccgcatcgccatggcggcggcggccgccgccagcggctgcaccgcgcccgtcacggtgcgcgactgcgcctgtaccgacaaatcctacccccgcttctggacggatctttccgcgctgaaaaccgttcccgcggcggaaaatacagaacttgaataaggagcttgaccatggaacttagtgattatcgccagcagatcgacggcatcgacagtcagctgctcgctctgttttaccagcgcatggaggtcgcggcacagatcgcgggctacaagaaggcgcacaatctcccggcgctcgatgccgggcgcgagcgcgctaagctgcagcagatcgcggacgccgcgccggaggacctgcgcgaatacgccgtgtcgctctactcgctcatctttgagctcagccgcagctgccagaaccggctgctcggtgtcacgagtccgctgactgccgagatcgaacaggccatcgcgcgcacaccgcaactgttcccggagcacccggccgtcgcgtgccagggcgtggagggcgcgtattcccagctcgcgtgcgaccgcctgttcacgatgccgaacgtgttttactgcgccacgttcgaggcggtgtttgccgccatcgaaaagggcctgtgccgctacggcgtcatcccgctggaaaacagcacggccggctccgtcaacgccgtgtacgacctgatgatgcagcacaacttccgcatcgtgcgcagcgtgcgcctgaagatcgaccactgcctgctggccaagcccggcacgaagctctcggacatcaaggagatctactcgcacgagcaggccatcagccagtgcggccgcttcctgcagagcctgccgggcgtgacggtcgtgcgctgcgagaacactgccgtggctgccaagcgcgtggccgagtcggaccgcacggacgtcgcggcgctctcgtcgcgcgcgtgcgttggactctacgggctcgagagcctggcctcctccgtgcaggatcagggcaacaactacacgcgctttatctgcatcgccaaggatctcgagatctatcccggcgccgaccgcacgagcctcatgatggtgctgccgcacaagccgggctctctgtacaaggtgctctcgcgcttttatgcgctcggcatcaacctcaacaagctcgagagccgtccgctgccggagcgcgactttgagttcatgttctacttcgatctcgagacgtcggtctattcgccgcagttccagcagctcatgggcgagttgccgggcctgtgtgaggaattctcctacctcggcagctaccgagaggtggtgtgatgatgcggtgcggacttctgggcgaaaagctcggccacagctactcgccggccatccacgcgcagctcgcggactatgcctacgggctctatgaggtcgcgccggaggacctgccggcgtttttgaccggcggcgattttgacgcgctcaacgtgaccatcccgtataaaaagacggtcatcccgtactgcgccgagctctcgccgatcgcgcaaaagctcggcagcgtgaacgtgctcgtccgccgggcagacggcacgctctatggcgataatgccgatgccttcggcttcgagtacctcgtgcgtcacagcggcatcgacgtcgcggggcaaaaggcgctcgtgctcggcaacggcggcgcgtccgcgaccattcaggccgtgctcgagcagctcggcgcgcacgtgacggtcatctcccgccacgggccggataactacgacaatctcgaccgccacgccgacgcgcgcgtgatcgtcaacaccacgccggtcggtatgtatccgaacacgggcagggccgccgtcgatctgcggcagttcccgcagtgcgcgggcgtgctcgatatcgtctataaccccgcgcgcacggcgctgctgctgcaggcggaaagcctcggcatcccgtgcgcgggcggactgtacatgctcgtggcgcaggccaagcgcagctgcgaggtgtttaccgatacggtgatcgacgacgcggagatcctgcgcatccaccgcctgctgcggcaggagatggaaaacatcgtcctcatcggcatgcccggcagcggcaagagcaccatcgcggcgctgcttgccgagcggctgcaccgcccggtgctcgacagcgacgcgcaggtcgtcgagacggcgggcatgtccatcccggacatttttgccgccggtggagagaacgccttccgcgcgcgggagacggccgcactcgccgagctcggcaagcgctcgggcgcggtgcttgcaaccggcggcggcagcatctgccgcgaggaaaattatccgctcctgcaccagaacggcacgattttctggcttcagcgcgacctcgcgctgctgccgaaggacggccgccccatctcccagcgcagcgacctcgccgcgctctacgcgcagcgtgcgccgctgtacgcccgcttcgccgacgcggtcattgacaacaacggcacgccggaggagacggtgcgcaaaattctggaggtgctggcatgaagtttctcgtcatcaacggcccgaacctgaacctgctcggcctgcgtgagccggccatttacggcagccggagctttgccgcgctgcaggatttcatccgcgcatccgccgccgatgcgggcgtagaggtcgacctgttccagtccaaccacgagggcgcgatcgtcgatgccattcaggcggcctacggcacggccgacggcatcgtcatcaaccccgctgcctatacgcacacgagtgtcgccattctcgacgcgctcaaggccgtggccctcccggcggtggaggtgcacctgtcggacgtcagcgcccgggagcctttccgccagatctcctatgccggcatggcgtgcgtgaaaacatacatgggtctcggcttcgagggctaccgtcaggccattttgtacctgaaacagtatctggaggaggcaaacgcatgatctcgaaacaaatggtcgcctggggcgagagcggctgctccatccgcgagatcgcggcctacggcgagcgccgcgcggccgagatcggcccggaaaacgtctataacttcgccatcggcaacccgagcatcgacccgccggactgcgtgcaggaggcggtcgagcggctgctgcacaccgtgccgcccacgcagctgcacgcctacgcgcccgcgccgggcatggcgtccgtgcgcgaaaaggtcgcggcttacctgacggacaccttcggcgaggtgtaccgcgcgcaggacatttacatgaccgacggcgcgtcgagcgcgctggccatcctcacgcgcgcgctcatgggtccgggggatgaggccatcgtgttcgcgccgtacttcccggagtacgccgtctatgccgaggcggcgggcggcagcgtgcgcgttgtgccgtgccgggcggacacgttcgcgctcgatctcgatgcgctcgcggccgcggtgacggaaaagaccgcgctgctcatcctgaactcgccgaacaacccctccggtgtcgtcgtctcgcgcccggagctcgaggcgctagcagcgttcctgcgcgaaaaacaggcccggtacggccacccgatctacatcattgccgacgagccgtaccgcgagctggtctacggcggggtggaggtgccgttcctgcccgcgatctatccgaacgcgatctactgctattcctacagcaagacgctgtccctgcccggcgagcgcgtgggctttctcgccctgcacccggccatagacgattacgccgccgtgcacgcggccgtgctcggcgcggggcgcgcgctggggtatgtgtgcgtgtcgtcgctgttccagctcgccgtggccgagtgcctcggccagacggcggacatcgcggcctatgccgccaaccgcgagctgatctacggcgcgctcacggacatgggctatgcgtgcgcgcggccggacggcgcgttttatctcttcctcaagtcgccggagccggacgcccgggcgttttgccgccgcgcgatggactatgacatcctgctcgtgccgggcgatgatttcggctgccccggctatgcgcgcctggcctactgcgtggcgcgcagccagctcgagcgctcgctcccggcgttccggaagctggccgagagctacggcctgaccaaataaatttcgcagacaaaaacggcgtccccgagccctcggggacgccgtttttgcgcggatggtgtcaggcgtacatggcgttggtgttcatatagtcatagatgaccttgccgtggtgctgctcctgcttttgaatgtcgttgagcacgctgcgggcgttggcatcgccaaactcgaacacgcacgtgtcgtacaggtgcgaggcgtgcttttccattgcgagcacgtccgtgcacaggtagcagtcgttttgcttttgcggggtctcggtgttgttgtaggtcgccgtgaacgtcgtcggcacggtcgcggagtctgccggtggggcgacggtgccgccctccatctgcgtgatcgcgtcgagatgctgctgctcgacctgcgcgatctgctcgaacaggtttttcagctgcgggtcgttggcgctggcggcgtggcggttatatttgtccacgcacagctgctcctgccctttgagatctttgagtaaactggcctcttttggggtcaactgcataaatatcacctcagtgccagtatgcccaccggcgcggcgggacatacaccggcggaaaaaaaccggtggcgtccgcgcgcaaaatcggttataatcgggctgaccctatggaaaagagagatgcagctatggcaaagatttttgatatttcggacttttccgcgccggagctggacgtgtacgcccgcctgacggaaaaccagctcgtcaaccgcgccgacccggcaaatgccctcttcatcgccgagagcccgctcgtgatcggccgcgcgctcgacgcggggtgcgtgccggtgtcgtttttgatggagcgccgccacgtggacggcaaggcgcgcgagatcctggcgcgctgccccgcggacatcccggtctatgccgccgagctcgacgtgctcacgcagctgacaggttttcatctcacgcgcggcatgctctgcgccatgcgccgcccggcactgccggaggtcgccgtcctgtgcgccaacgctgcgcgtgtggccgtgctggaaaacgtgatgaacccgacgaacatcggcgcgatattccgctcggcggcggcgctcggcgtggacgccgtgctgctcacgtcggcgggcagcgacccgctctaccgccgcgccgtgcgcgtgagcatgggcacggtctttcaggtgccgtggacgtacctgcctgaggacggcgactggcagcagacgctgcacgccctcggctttcaaacggcggccatggcgctgcgggacgattcgctgcgcatcgacgacaagcgcctgcgcgccgtgccgcgccttgccatcgtgctcggcacggagggggacgggctggccgcccgcacgatcgccgcgtgcgattacacggtgcgcatccccatgacgcatggggtcgattcgctcaatgtggccgcggcgagcgccgtcgcgttttaccagctcgcgctgctgcgcggctgagactgtcaaaaagtgttactttttgacaaagaggctgcagtctgctgcgcgcataatttgtgcgtccacggcgcacaaattccacacttgcagcctgagaagtattttctccgacgcacatgtcgccgaagaaaatgatctcactttctttcgccgctccggcggcgaaactctacgaggttttggataaactgaactccggcttccgttctggaagccggagttttttgttattctcagacgtcgaaccggtcgtagttcccggcgcagtcgaggcacagcttctgcccgccgacgaggcggatccagttggcgcccgtcacctcgccgcagcacgcgcacgggtaggagtcaaatagtttggccggctctggcagcgggatggtcgccggtttgacgtcgaacaggtcggccggtttctgcgcctgatagtaggcgaaggattcctcgcgcgtcatcccctccggccgcggccggagcaccaggcgcacggacttgcccgtggcgcggttgtaaaacgagaacgcctgtttgccgcgcatatgaaacagcaggttgcccttgccgatgctgcacccgagcagcgcctgaatggcgtccacgccgcaggcgtcgttttccgcgatgcacacgacctgctcgtcgccggagaaggacagctccagcagctcggcggcgtagcacgcggccttatatccgatcgtcagcccgccgcaggcgtggccgtgaaattgtacgcaggtttcccagttggtcatgatcttgtctccttttcttcgtcatcaatgagcacgagcctgtgcccctgcacgtccacgatgctgcccgtcacgccgtagacgtcccgcagggcgtcggtgtcgaagatctctgcgccgccgtaacggtacacctcgccctcgcgcagcagcagaaagcggtcgcagaaccgcagcgcgaggttcaggtcgtggatgacgatcatcgccgtgagattctgctcgcggcacaggtcgcgcgtgatctgcagcacctgatattgattgcggatgtcgagattgctggtcggttcgtccagcagcaggagcgtcggctcctgcgccagcgcgcgggcgagcatgaccttctgccgctcgccgccggagagccggttgaggaaccggccgcgcatgtcctccagattcagatagcgcatggcctcgtgcacgacatggtggtcgtgctccgtcacgccccaggtcatgtagggccgccgtccgagcatgaccatgtcgtgcacggtcatctgtgtgtcgggcacgtgctgtgccacgaaggctacgcgttttgcgatctcccggtgggagagcgtgagcagatcctccccgtcgatacggcagtgcccgctgtcagccgtgaggatacggttcatgcacttgagcagtgtgctcttgccgacgccgttgttgccgagcacggccagaaagcgcccgctctccagttcaaagctcacatcgcggaggatcggccgcccgcccttatagtgatagcagagatggtccacacagatcatgtccggcccctccccttgaacagcaggtacaaaaacagcgggccgccgagaaacgccgtcagcgcgccgatcggcagaatgaccggcatgatgaccacgcgcgcggccagatcactcagcagcagcagcgccgcgccggcgagcacggagccggggatgagatagatatagttgttgccgacgaccatgcgcacgatgtgcggcgcaacgagaccgatgaagttgatgaggccgacgtgcgacacgatcaccgagcagacaaagcacgtgagcacaacgttcgtgagtgtcagccgccgcacatggatgccgagactcagcgccgtctcctcgccggagagcagggcgttatagtcccagcggtgcaggtagcagtagccgatcagcagcagtacggccagcgccatgccgcgcagggactgccagtccgtgctgccgaggtcgccgaacgtccagaatacgagcgacgagagcgcgacctcgtcggcaaagtattgcagcagcgtggtcgcgccggtcagcatggagctgatggcgacgcccgcgagcacgatgccttccgaggagatctgcttgaactggctcagccccagaatcacggccgcgacaagcagcgagccgagaaacgagcacagcggaatagcccagctgccggcctggctcaggccgagaccgatgatggcgacggctgcgccgaacgtcgcaccctgcgacacgccgagcgtagaggccgaggcgagcggattgcgcagcacggcctgcaggatgcacccggccagccccagtcccgcgccggcgaccatggcggtgcagatgcgcggcaggcggttattgcggatgacgagattgatcttcgcgtccgacgcccggccgaagatgccccggatgagctcggcggcgggcgtgttgtaagacccggcgcgcagcgacaaaaagaacgcgagcgccagaatggccgccagcaggatcagaaagcggatgcttctggcgcggttgcggctgtagtcggaatcgtgcggcttactcgccgagtgtgatggcacggaatgcatacccggcctccttcagatcgggataggggttggagccgagcagctccgtaaagatctcgccggccttggcctcggggtcaatgtcggcaaactgctccggatacagcacgcaggcggcataataggcatcggccagcgccgtctccagattggaggccgaggagcggaacgagatctgcgagtagacctttccgctgcgtacggcggtgaggctgttataaaatgcaggattcgcctgataatcttcgttgatcaggggcataccattaaagtccaggaagatcatgtccgggtcccaggcgagcacctgctcggtgtcgatgttgaacgcgccggtctgcccggtcgtgtcggcgaggtttttggcgtggatgagcgcaaacgggccgtagcctgcctccgtgccctcaaagccgtgctgccccttgaaggacacgccgccaacatagacggacggcttctgatcgtctgcaatcttggccgtgcgcgtgtcgaggtcggtctggatgcccttgaggtacttggtcagctcttgcgcgcgcgtttccagcccgtagagctcgccgagcagacggatggtctcgtaggcggcgtcatcgagcgtggtgtcgctgccgggcacgacaaagaccgggatgccggtcttcgcgctcagctcgtccgcatcgcacgaggcgtaggcgctcatgacgatgacctgcggtgcgacgtcgatgatctgctccacatacggctcgccgttcgtgccggtgacgggcaggtccttgaatttatcgaagtttacgtagttatacaggcggctcatgccggccttggtctcgtagtcctccacgccgaccacgcggtcagccgcgccgacatagcagctgtagcgcagcgcgccgacgccgacgcacacgacgcggtccacctgtttggggacttccacggtgcggtttttgctgtcggtgagcgtgcgcacgtcgccggaggcgccgtcgttcgtttttacgccgcaggccgtgcaggccagcagcgtcaagactgccagcagcaggcagatccatcttcgatttcgcatagtgcgtgtatcctctcttcctgtatttctccgtttcggagcattgtcattagtataacggacggcggccgaaactgtaagcccccgtaggggatgaaaatatgcgcagatttttcatgaaatatttgctgacagtcgcacggaaaacgtctgtttatcaacgcgagatacgaaatttggtgaaaaacgcgctgcaaactgtggcgttttacaattttacacgcattttacataagcgctcttttcgtttttacatcccatgcttatcctgtgaagcgtagggaacaaaaaaccaaaatcaaaatcgaagttcgaaaggagcacttcatcttgaaaaagatcattaccattttgtgcattgccgtcatggcgctctcgctgtttgcgggctgcggccagaaggcggacgacaacaacacggccgctgccggcggcacggtctcgaccgacggttccacctcgatggaaaaagtcatcggcgcgctcggcgagtccttcatggaagcaaactcgggcacgaccttcacctataacccgaccggatccggctccggcatccaggccgtctccgagggccgctgcgatatcggcctgtcgagccgcgcgctcaaggacgacgagaaggcatccggcctgaaggagaccaccctcgccctcgacggcatcgccatcatcgtcaacccccagaaccccgtcaaggacctgaccctggagcagatcgccaagatctacaccggtgagatcaccaactggaaggatgtcggcggcaacgacgccgagatcgtcctcatcggccgcgaggccggcagcggcacgcgcgacggcttcgagtccatcaccgacacgaaggatgcctgccagtaccgtcaggagctgacctccacgggcgatgtcatcactaccgtgtcccagaacccgaacgccatcggctatgcctctctggctgccatcaaggacagcgtcaaggccctgaccgtcaacggtgttgccccgacggaagcgaccgtcaaggacggcacctacctcgtgcagcgtccgttcgtcctcgtgacgaaggaaggcgtggccctgagcgagaccgcgcagaagttcttcgactttgcgacctctgcagatgccgcgtccatcatctccgcggcgggcgcagtcccggtggcctgagccacagacaagcgtacaggcggctggagaccagccgcctttcgcatatacagaggtgctggatatgaaaaagagatctcaagttctggagacggtcgtgcatggcgtgtttctgctccttggccttatcaccgtcgggtgtgtgctgctcatcagcgtgtacctgatcgtctccggcatccccgccatccggaagatcgggctcgtcccgtttctgttcggcaagacgtgggcctccacggcggcagagccgtcgtacggcattttgccgttcattctgacaagtgtatacggcacggccggggccatcgtgctcggcgtgccgctgggcttcctgacggccgtgtatctggcgaaggtcgccccgccgcggctcaagaccgtgctcgaatcggccgtgagcctgctggccggcatcccgtcggtcgtctacggccttgtgggtatgctcgtgctcgtgccgggcatccgcaaggtgtttcacctggccgacggcgcgagcctgctcgccgccatcgtcgtgctggcgatcatgatcctgccgtcgatcattaaggtgtccgtcacggcgctcgaggccgtgccacccgagtatgaggacgcatcgctcgcgctcggcgcgacgcccatcgagacgtatttcaaggtttccgtcccggcggcgaagagcggcattgccgccgccgtcgtgctcggcgtcggccgcgccatcggcgaggccatggccgtcatgatggtgtcgggcaatgtgccgaatatgccgagcctgtttcagagcgtgcgctttctgaccaccgccgtcgccagcgaaatgtcctactccagcggcctgcagcggcaggcgctgttttccatcgcgctggtgctgtttttgttcatcatgctcatcaacgccacgctcaacttcttcctcaagcgcaataaggagggggacaaatgaaaaagaaagccgtttccggtggccgcagggcctatattctcaccatgcgcatcctcatgggtgcggcggccattatcacggcggcgctcgtgctgtttctgatcgcctacgtgctcatcaaaggcctgccgaacgtgtcgtgggcgctgctgtccaccgcgccgagctacctgtccgaccgcatcggcatcctgccggacatcctcaacacgctctatatcgtcatcgcgacgctgctcatcgtcctgccgctcggcgtgggcgcggccatctacctgaccgagtacgccacgaaccgccggctcatcggcgccatcgagtacgcggccgagacgctctccggcatcccgtcgatcatctacggccttgtgggcatgctgtttttctgccagtttctgaacatgaaaacatcgctgctggccggcgcgctcacgctcgtcatcatgaacctgccgaccatcatgcgcaccacgcaggagagcctcaaaaccgtgccgcagagctaccgcgagggcgcgttcggcctcggtgcgggcaagtggcgtgtcatccgcaccgtggtgctgcccggctgcgtggacggcgtcatcaccggctgcatcctgtctgtcggccgcatcctcggcgagtcggccgcgctgctgttcacggcgggctttgcccacgcgctcaacgactttttcgagggactgagcagcgcgggcgccacgctcaccgtcgcgctttacgtttacgccaaggagcagggccggtttgatgtggcctttgccatcgccgccattttgatgatccttacgctgctcatcaacggcgctgctacgctcgttgagcgatacttcaggaggaaaagaagtttatgagtgacattatgacagtccagggcctggacctctggtacggagatcatcaggcgctgcacgatatcagcatgaatattcccgaaaagagcatcacggcgctcatcgggccgtccggctgcggcaaatccacgtttctcaaaacgctcaaccgcatgaacgacctcattccgggcgtgaagatcacgggcgatgtgcgctaccgcgatcaggacattttcgcccccggaacggacgtcaacgagctgcggcgcgagatcggcatggtctttcagaagccgaacccgtttccgatgagcatctacgacaacattgcctatggcccgcgcacgcacggcatcaaaaaccgcgccaggctcgacgagatcgtcgaaaagtccctgcgcggcgcggccatctgggacgaggtgaaagaccgcctgaagaaaaacgccctcggcctctccggcggccagcagcagcgcctgtgcatcgcccgcgcgctcgcggtcgagccggaggtgctgctcatggacgaacccacgagcgcgcttgaccccatctccacgtcgaagatcgaggagctggccatgcagctcaaggaacagtacacgatcgtcatcgtcacgcacaacatgcagcaggcggtgcgtatctctgaccgcacggcgtttttcctgctcggcgagctcgtcgagtgcggcgacacgcagcagctgttctcgcagccgcaggataagcgcacggaggattacatcacagggaggtttggctaatgagaagccggtttgatgaacagctcgcgctcctgaacaaggagatgatcgagatgggcgcactgtgcgaggaggtcatcgcgctcgcatccaaggccctcacggaggcggatccggagctggcgcagcgcgtcgcgccgctcgatgccgagatcgaccagaaggagcgcaacatcgagtcgctgtgcctcaagctcctgctccagcagcagccggtcgcgcgcgacctgcgccagatctcggccgcgctgaagatgatcacggacatggagcgcatcggcgatcaggccgaggacattgcggagatcatccagtttctcgccggccgttcggcggaaaatgacgatctgctgcgcgaaatggcgctctcgaccatccatatggtcacagaaagtgttgacgcctacgtcaagcatgatacaatgctggcagagacggtcatcgccgaggacgatgtcgtggacaacgccttcgacgaggtcaagcgccggctgatcgacaagatcgccgcccaccccgacgacggggagtacgcgctcgacctgctcatgatcgccaaatacttcgagcgcatcggcgaccacgcgacgaacatcgccgagtgggtgatcttctcggtcaccggggtgcacaaggaggggtaagccatgatctggtgtgtggaggacgacgccagtatccgcgacattgaggtctatacgctctcatccacggggtttgacgcccgcggctttgccgacggcgtgtcattctggtcggcgctccagacggagaagcccgatctggtggtgctcgacgtgatgctgcccggcgtggacggcatcgagctgctgcagcgcatgaaggcgtcggcggagctgcgcaccatcccggtcgtcatggccacggccaagggcgcggagtacgacaagatccgcggcctcgacctcggcgcggactattacctcgtcaagcccttcggcgtgatggagctcgtgtcctgcgtcaaggcggtgctgcgccgctgccagccggaaaaagctgcacatcagctgcgcagcggcgggctcgtcgtcgatctcgacgcacacacggtcacggtcgacggcgcgcgtgtcgcgcttacgtataaagaatttgaactcctgcgcctgtttctgtcccatccgggcatggcgttcacgcgcgaccagctctttcaggagatctggggcatggactactgcggcgagacccgcacggtcgacatgcacatccggacgctccggcagaagctcggcccctacggacggcggatcgaaacggtgcgcaatgttggctaccgcatggaggcaacgacatgaccaaaaagatctttcaatccatcctgctcgtggccgggtgcgtgctgctggcgagcctgctgatcatcgtgggctttttgtacgattacttcggcggcgtggagaaaaaccagctgcgcgacgagctgagcctcgctgcggcggccgttgaggacggcggcacggactacctgtcccagctgacggccgaccgttatcgcctgacatggatcgcggccgacggcagcgtcctgtacgacacgaagaccaacgccgagagtcttgagaaccacgcctcgcgcgccgaggtcagtcaggcgctggcgaccggcactggcgagagcacgcgctattcctcgacgctcatggaaaagaccatgtactacgcccagcgtctggacgacggcacggtgctgcgcatttccatcagccgcgcgacggtcggcatgatcgccgtcggcatgatccagccgctgctgatcgtgctcatcgtggcgctcattctctccggcctgctggccagacggctgtcgcggcgcatcgtcgacccgctcaacagcctcgatctcgagcacccgctcgacaacgatgcctacgaggagctctcgccgctgctcaagcgcatccaccaccagcacgtcgagatccagacgcagctgcgcgagctgcgcgaaaagaccgacgaattcacgcagatcaccggcagtatgcgcgagggccttgtcctgctcgacgagcacggcagcatcctgagcatcaacgccgcggcgcaggcgctcttcggcgcggacgcgcagtgcgtcggcagggattttctcaccatcgagcgcagccacgagatcagcaccgccattcaggccgccgctgcggacggccacagtgaggtgcgcgccgagcgcgcgggccgcgtgtatcagttcgatatcagccgcatcacgtccgacgggaaattcctcggcacggtcattctggcctttgacatcacggagcaggagtttgccgagcgcaaccgccgcgagttcacggcgaatgtctcgcacgagctcaaaacgccgctgcagggcatcatcggcagcgccgagctgatcgaaaacggcatggtcaggcccgaggatctgccgcgcttcgtcggccacatccacgccgaggccgcgcgcctcgtcacgctcatcgacgatatcatccgcctgtcccagctcgacgagggcgacgccatgccgacggagccggtcgacctgctcgccgtgtcgcaggaggcggcggagaacctgcacgacgccgcggccgcgcgcagcgttacggtcagcgtcacgggacagccggccgtcctgcccggcgtccgccgcctgatctatgagatcgtctataacctctgcgacaacgccatcaagtacaaccgtgacggcgggcgcgtggacgtgacggtcgcggccgatgccggcggcagcagcatcaccgttgccgacaccggcatcggcatcgcgccggagcatcaggcgcgtgtgttcgagcgcttctaccgcgtggataagagccactccaaggcgtccggcggcacgggcctcggattgtcgatcgtcaagcacgctgtgcagtatcaccacggccgcatcgagctcgagagcacgcccggcacgggcacgaccatccgtgtcgtgttcccgaacccgtgacccggtatggaaaaacagagcggacttccggctgcggaagtccgcttttttctgccccgcagggcttgacacccgggcggggcggtgttatcatgcagttgagattaaacatatctaaccaatcggtttttcaaggaggacattccatgtatcagatcacactggggatcgacggcatgatgtgcggcatgtgcgagagccatatcaacgatgcggtgcgcaatgcctttccggtcaagaaggtctcgtcctcgcacggcaagggccagacggtcattctctccgaaacggagatcccggaggcggagctgcgcccggtcatcgccaagacgggctacgagctcacgagctacgcctgcgccccgtatgagaaaaagggcctgttccaccggcactgaacatagccgaacaggacaagcggcacgcggcggtcatctgaccgccccgtgccgcttctttttatttcggctcaaagccgtgctccatgcagtacacgcgcaggatggctgcctgcgtctttgcgtccgggatgcgcccggccagcacgtcgcgcgcaagctcgtcgagcggcacggcctgcaggttgagaaattcatcgtcgtcgagctgctgctcgccgaaggtcaggccgcgggcgaggtacatccagatgacctcgtccgagtacgcggcggcggggtagaatgggccgagcgggatgagctcgcgcgccgtgatgccggtctcctcgcgcagctcgcggcgcgcggcggcctcgggtgcctcgtcgcggctgtcgcgcttgccggcggggatctccgtgatgacctcgttcaccgggtagcgaaactgccgctcgacgatcacgcggccgtcgtcgagcagcggcacgatgcacaccgcgcccacgtggcgcgataattcgcgcggcgcggtgccgccgttgggcaggcgcacggtgtcgcggtaaaagtcgagaatgcagccgctgtagatcttttcggatgtgagtttggtttcggtcaggttgtccatggcgcgcctccttacaggccgaggatctgcagcgtgcgcgtgtcgggctgcccgccgaagaatttatcgagcacggcggaaaacaccggctcgtccggcgcggcggccgcgaagagcgtcatgctcgagcgcagcttcaggtcgtccggaaagccgaacacggccgtggggtcactctcgtcgagtgccagcagggcgctgctgatctccagcaggtgcgcgcgcagcgtcggctcgcgcagataggcccgcgcctcgtcgagcccggagatggcatagtactgcgacgtgctgctcatgcccagccccgcgacctgcgggaagatgtaccagatccagtggctgcgcttgcggccgttttggatctcgcgcagggcggcggcgtagtcccggcgctgtgcggtgagaaaacgatcaagatcatacatggtattgccctccttacgtgggaatgaacgggtcgttcgcctctgattatgccccttttcgaccggccttgtcaagcgcggcggccgcgcagatcgggttttacaatgcgcgccggctgcgttacaataggtctgctgagaaaggagcgttcccatgagtatgacattggagaccatccgggcggcgcacgcgcgcatcgccccctatattgtccggacgccgctgctgcgcctgccggcgctcgacgacgccctcggctgcgaggtgtatgtcaaggccgagtgtatgcagcgcacgggcgcattcaagctgcgcggcgcaatgaacaagatcctcaccctgacggacgccgagcgtgtgcgcggctttgtcgcggcgtcctccggcaaccacggccgtgcggtggcctatgccgcgcagcgcttcggcacgcacgcctgcatcgtcatgccgcgcacggccccgcccgtcaagcaggcggctatccgcgcgctgggcgcggagctcgtgctgtgcgaggcgtccgagcggttcgacgtggcggcgcggctgtgcgccgagcggggcgcgacgatggtgccgccgttcaatgacgaggcggtcatggcggggcagggcaccgtcgggctggagatcctggcccagtgcccggagatcgatgcagtcgttgtcccggtcagcggcggcgggctcatcggcggcgtgtccacggccgtcaaggcgctcgcgccgcgcgtgcgcgtcttcggcgcggagccggccgcgctgccgcgctatcgggagagtctgcgtgccgggcacccggtgcgggtggagcagaagcgctcggtcgcggacgcgctcgtcgcgcagatgccgggggatgtgtgcttcccgtatgtggcggcaaataccgacggctttgcggccgttgcggatgatgctattcttcgcggcatgaagctgctgcttctggagggcaagctgctgtgcgagccgtcgtccgccatcggcatcggtgcggcgctgtgcggccggctcccggtgcgggaaggggacaaggtctgctttgtcgtcagcggcggcagcgtcgcgctcgagcagctgcaccagctcgaggacgtcaggctctgacagacagcaaatatccgccccggcgcaccttccgtcagaagggcgcgtcgaggcggatgctgtctcgggtcgttatttgctgcttgcgagcgcctgatcgatgagctcgttgagcttctttgcctgatcgggtgcggtgatcccgccgacgatcggctggccgacgatgttgccgtttttgtcaacgacgtatgtggtcgggaacgagtacaggccggcggtgaacttaccggcctcgctgtcggaggcgaaccagaggttggagtaggtcacgccctttttcgccagaatgtccttcgcctcggcgatggcggtcttgtcgccgtcgagcgtgaaggagttgatgccgacgaccgcgccgcccttcgcggcgaggtccttgttgagcgcctcaaggtcggccagctcaccgacgcacgggttgcaggtggtgaaccagaagttcacgaccgtgacgctgttgccggcgaagagcttgctgctgtcgacgtcattgccgtcgagatccttgccctgaaagctcgggaatttcatcgcgtcgctgccggaggcggtcatgccggcctcctccgcgctcacgctgtcacctgtgccgggcgtcgtgccgcagccgggatacttctgttcgaggatggtgagcttgccctcgatctccttgatctgctcggcgccggccttgagcgtcttgagctcgtcggctgagaagccgtccttcgcgctctcgatcgtggcgagcaggaagtcgccgtagttcgtgccgtcctcgatcatggtgctgtttttgttggcagacagaaacaccttgttccagaggtcggagtttgcggcgagaatgtcgttttccttctgcatgagctgctggtagagcttgctcgcttcgtcggcgctgttcggctcggtcgcgatcagggtcgcaatgtcggcgctgccgtccgccttgtccttgtctttgcccgacgagcacgccgcgaggctgaacaccatcgcgagcgcgagcaggagcgtcacaaattttgtgattttcttcatcatgattcctccgtttgattttgatggttgcttacttgtttcggattcgtgtttccgctcaggccgaagccatagcggaagcggatggcttgcgtggggcaggcgcggatgcacttgccgcagcggatgcattccgtgtcgttgggggacttggtgatgtccacgtccatctggcaggtgcgcgcacatttgccgcaggagacgcacttgctcgtgtcgacctggatgccgagcagggagaccttgttcatcagcgcgtaaaacgcaccgagcgggcagatccatttgcagaacgggcggaaaaacagcacactcaaaacgacgacagcgatcagaatgatcagcttgcgcgtaaacagcgcgcccagcgccgcgcggatgctctcgtttgcggcggcaagcgggatcgcaccctcgagcacgccctgtgggcagatatacttgcagaaatacgggtctcccatgcccacgtcgttgacgatgagcgccggcagcagcaccacggccagcagcaggatgacgtatttcaaataggtcagcggcctgagcttttttgtcgacagctttttgcccgggatcttatgcagcagctcctgcagccagccgaacgggcacaaaaagccgcagatgaaccgcccgagcagcacgccgagcaggatcagaatgccggtgatataatacgaaaagcggaatttggacgagccgaccaccgcctgaaacgccccgatcgggcacgcgcccgatgccgccgggcaggaatagcagttcaggccgggcacgcagacggtcttgcccttgccctgatagatgccgcccttgaagaagttcggcaggtggatgttggtcagcagcgtcgccgccgcctggatccagccgcgaaaccggctcaagagcagggaaacagactgttttttcttatccaatgccgacacactccaagcacagccggatcgccttgttgagcacggcgccggcctcgccgcgcagcgcgccgaagcacaccatggcgatgcctgcagcgatcagcagaacctgcacaacggctttcttcgcacgaaacacccggatcactcccttctgtttgccccatgataccatggcgcagataaaatcttcgttaagaacggaaacttaacagagattttatgcctttgtgttatcatataacaaagtcggacattcgtaaatacgcacgaggagaatggtatgcatattttggttgtggaagatgaaaaggcgctctgcgacacgatcgcgcgcagtctgcggcggcttgcctacagcgtggactgctgctatgacgggcagagcgccgcggagatgctcgccgtcgagcgctttgatctggtcgtgctggatctgaacctccccggcgaggacggtatgacggtgctccggacgctgcgcgagcgtgaccgcgacaccaaggtgctgatcctgtcggcgcgctgcgaggtcgccgacaaggtggcgggactcgatgcgggcgcgaacgactatctcaccaagccctttcacctcgatgagctcgcggcgcgcatccgcagcctgacactgcgccgctttacgcagagcgacgtggtcctgacctgcgccgagctgtcgtttgacaccaaggcgcgcacggcgtccgtgcgcggcgagacgctgtcgctcacgcgcaaggagacgggcatcctcgaatacctgctgctgcatcaggggcggccggtcagtcaggaggagctgctggagcacgtgtgggacagcggggcggacggcttcggcaactccatccgcgtgcatatctccgcactgcggaaaaagctgcgcgccgccctgggctatgaccccatccgcaaccgcatcggcgagggctatgttatggaggcgcagacatgaagcggttatctctgcagtggcgcatcacgctgatgacggcggcgctgatcggcgtgacgtgtgtgctcatgaactgtctgatcggctattccggcaagcggtatatggatgcgatcggcagcggcatctcggcttacggcgagatcgaatccggtgcgcccgacgccttcgatccgcagagcaaacagccggatgacgagctgacgatcatcatcagcggcgcgcaggcggccttcggcgtcacgaactggtacatcacggcggcggtcacgctcatcggcggcgtgctcgcgtattttgtcagcggccgcgcgctgcgtccgctgcgcagttttgcagcgcaggtggaaaacattcagccgagcaatctggcgcagtgcaaggtcagcgaggacgtgctgccggagtttcagcgcttcagccgctcgttcaacggcatgatcgaccgcctggacgcgggcttcacggcgcagcggcagtttacgggcaacgctgcgcacgagctgcgcacgccgcttgcgctgatgcaggcgcagcttgagctgttttccgccgagcacgcggacgtcacgcccgaaacggcggcgtttttgagcctgctgcaggagcagacggagcgtatggcgcagatgacgaagatcctgctggagatgagcgagctgcgcaccgtgccctgtgacgaccgggtcgagctcgcgcccatgatcgaggagatcttcaccgatctcgcgccgcttgcagagagcaagtgcatcgcgctggaggccgacggcggcgctgtgctcaccggcagcgacccgctgctgtaccggctgctgttcaacctgaccgaaaacgccatccgttacggccggccggacggggcggtgcgcatcgcggtcagcgaggcggacgggaatgtacagatccgcgtccgtgaccacggtcccggcatcccggaggcataccgggagagcgttttccagccgtttttccgcgtggacaagtcgcgcagccgggcacacggcggcgtcggactcggtctgtcgcttgtgtgggagattgccgcgctgcacggcggcacggtgcagatcgagcgcagcggcgcggacggaacggtcatgctcgtgacgctgccgcgcgacggcaaagaatcctaaaacacaggcggcggccaggtcatccccggtcgccgcctacagcttgtccaaaaacctcgtagagtttcgccgccgcagcggcgaaagaaggtccgatcattttctccggcgacatgtgcggcggagaaaataccgctcaggctgcaagtgtggaatttgtgcgcagcagactgcagtctctttgtcaaaaagtattactttttgacagtctcaaagcggcagccggatagctccggctgccgcccgtttttgttcgtgccttaccagatgccgagcacgtgctgcatcagcaggctcatgcccgcgatgccgacccagcagcaaaagcccatgatgagcggcttgccgccggttttgacgagcttgacgatgttcgtgttcaggccgacggcacacatggccatcacgatcaggaacttgctgagcgtcttgagcggggtgaacacgcttgccgacacgccggcgctcacgcagatggtcgtgatcacggacgcgagcaggaagtagaggatgaacatcgggaagatcttcttgaaattcaccttcgtaccgtcggtcttggcgcgcttcgtgcgcacgaaggcgagcacgagcgtgatcgggatgatggcgagcgtgcgcgtgagcttgacggtcacggccttgtcgagcgtctggctgccgagcccgtagagcgagtcccacgtggaggccgcggccgtgacggacgacgtgtcgttgatggccgtgccggcgaagatgccgaacgcctcgccgttcgtggtcgagaagccgagcagcgcgccgagagcggggaagaagatggccgcgagcatgttgaagaagaaaatgacggagatcgcctgcgcgacttcctcatcgtccgcgtcgatgacggacgcggtcgccgcgacggccgagccgccgcagatcgacgagccgacacccacgagcgttgagatcttgccggggatgtgcagcagcttgtgcagcagccacgccacgacgagcgacgtcgtgatcgtcacgaggatgatcggcagcgactgcttgccggtctgccagatgacggacaggttcatgccgaagccgagcaggatgacggcgtactgcagcacctttttcgacacgaacgagatgccgggctgcgccgcgctcttgtcgtgccagagcagcgtgacgatcatgccggcgaggatgccgaacaccgggccgccgacgatcggaaaccgctgcccgagcagccagcagggcacggccatgacgaggcacacgaggatgcctttccagtttttctgaatgaagttcatagtgggtcgaggattcctttctctccatgcgttgtttgcagagagcatcatagcacacctgaacgataaagaaaaatgatttctatttatcaaatgataattttgtgttatcattagctgaaaacctacaggaaagagggatgcccatgctggattttcgcgtcgagacgtttctggccgtgtgccggcacatgaattttacgaaggcggcgcgtgagctcaacatcacgcagcccgcggtctcgcaccatatgcactatctggagcaggcttatggtacggcgctgtttcagcacaacggcaagcgcctgcagctgaccgaggcgggggagattctgcgccgcacgctgatgacgatgaagcacgacgagcagcacctgcaaaagcgcatgcagcaggccgcctccggcacgcgcgactattcgttcggcgcgacgctctcggtcgcggagttcatgatcaacgaggcgctcggccggtttctgcgcctgcacccggacagccacattcagatgcaggtggcggatacgaaggtgctactgagcaagctcgattccggtgagctggattttgcggtcgtcgagggtgactttccgaaggcggagtatgattttttcgtcttcggcacggaggagtatgtcgccgccggagacccggagaaggccgcgcgctaccgcggccgcccgctgacggacctgctgggcgagccgctgctgctgcgcgaggagggctcgggcacgcgcgtgatcctggagtattacctgaaggagcacggcctggcggcggcggattttgcccgcacggtcgagatcggcaacatcggcgcgatcaagacgctgctcaaaagcggctacggcgtgtcgtttctctaccgcgcggccatccgccaggaggaggcggtgggcgcgctcggcgtgatcgaactgagcgactttgagctgcggcacgacattatgttcctgtttccgaaaaacagcaatttccgcgccgattatacgaccattttccgcgagctgcgcgcctgcgccgaagaaaccggcggcgcgtgaccccacacccagcaaaaaggaagccaccgcagcgcatgatgcgctgcggtggctgttccattcacgtttcgtcagcttttgaccaatgccacggcggtttcgatatgctccgtgtgcgggaacatgtctaccggctggatgcgcgtgacgcggtagccgtgccgggtgagatagcccaggtcgcgcgcgagcgtctccgggttgcacgacacgtacaccacccgctccggcccgacggccgtcacggcggcgagaaagcgctcgtcactgccggcgcgcgggggatcgaggatgatgacgtcggcgtgttcaccggccctggccatgccctgcaggaagtcgctcgcgtcggccgtgtagaagcggacgttgtccgcgcggtttgccttcgcgttgctgatcgcgtcgcgcacggcgtcgcggttattttccacgccgattacgcgcgcggcgttccggctggcgaagatgccgatcgtgccggtgccgcagtaggcgtccacgacggtctctttgccggccagcccggcgtagtcgagcgccgtgcggtagagcacctccgtctgcacggggttgatctgataaaacgcgcgcggcgagatgcggaacgtgaagtccccgagctgctcgcggatatagcccggcccatagagcacctcgctgtggggcccgagcacaaggctcgtctgcccggcgttgatgttctgcacgatggtcgtgatgtccgggtgccgctgcagcagcgcgcgcacgaagttgcgcttgccgggcagcatgccgtgcgccgtcacgagcacgacgaggatctccccgctgcgccagccgcgccgcacgagcacgtgccgcagcgtgccgcggccggtttcctcgtcatagggacggatcttgaagctcttgagcaggccgcggatcgtgacaatgatctggtctgcgaccgtgtcctcgatcatgcagtcgctgaccggcacgatccggtgcgaggccgactggtacacgcccgagatgatctgcccctgccgattgacgccgaaagcggcctgcaccttgttgcggtagtggtagggatctttcatgccgatgatctcctccacgtggccgaagcggccgagcaggcggatggccgtcgcctgtttgagatgcagctgctcgtcatacgacaggttctgcagctggcagccgccgcacttttttgcgagcggacatacgcgcgatggggtgtttgccatggtcatgacctccggtcttgcgaactcttttctttatcctagcacatcattcgtcgcttttccacacggtttttgcgcgcggcaggttccactcgaagtgcgccgcggcgcagcggatgacgatgacaacgaccacgctggtcaagatcgcgcccgcgccctgccagacctgctgcagcagcagatagagaatgccgcccgcgatggacgcgctggcgtagatgtgcttgcgcaggatgtagggcatatccccggcgaggatatcgcgcagcacgccgccgcccgtgccggtcagcaggccgacaaacaccagcagcagcgggtcggtgcacccggcgagcgtggtggcggtgttcatgcccgtgatcgtgaagatgccgagcccggccgcgtccatgatgagcatgagcgcgtcgaacacacgcttgctgcggccgatgatccggcgcacgaacgggaaaaacagcacgaccgacacgccgagcgcgacgagcagatagatcgggtcctgaaatgcgcgcggcggcgtcagccccacgacgagatcgcgcagaatgccgccgccgacggccgtcgtgatgcccagcagccccacgccgaaaatgtccatatgcttttcgatgccgagcaccgcgccgctgacggcgaacgcgaccgtcccggccagctcgagcagaaagaggaaggtttccatcgtcatgacctccgaaaaaagagtacacccctgccgtggtgcaggtgtgtactctgtccttttacctgaaagattggccgcgcggccttgcttcttcggtgcggaatcgtctctccagagctccgtcagccaccggtccttttgcctgagagtgtcactccttcggcggccgcagcgctctcccggcggcatcttacggcatccatctccgacagtatagcagatgcggcgaaatttgcaatgccgaattttttcgtgtacactgtttgcagaaaatgacgggaggtacgcgcatgaaacggattttctgcggtctgttgtgcgcagcggcgctgctgctgacggcctgcgggcaaaagacggcggcacaggccgaagctgcggcagaccccgccgtcgcggcggcgcagcggtatcaggccatcgtgcaggcggtcggcgacggcacgcgtgcgggcgtcaatctcacggacgcgcagatcgcgcaggcggtggcgcagctctcggacgcaggactcacggccgtgcacgtggacgcggccgacccggtcacgcacccggagacggtgacggcgttctgggatgcgcgcgcggcggggcagacggccgaggccgcgctctacgaggtctgccgcgacggcgggctgctgtgccacacgctgcggttcgcggacggtgcggacaccgtcacgcgcacgcgcgtcgtctggcgcgacggggcgttttccgtgagctacaccgatacgtatgccgtcacgtccctgacgctcgacggcgggcggctgacgtatgtctatgacatgcccgacaatccgccgggcacggatcacgacgggcacatcgatacgcaggagatatttacgatcggcgaatcataaagcggcgcgccccgttcggggcgcgccgtcttttcctatcttatgcatcttatgcgcggcgggcgtcggctgccgccgcagtgtgcagcagcgcggcctgcgccagcagctccatgccgtcggccgcctgcgggtagcgcgcggcgaggccgaagtgcgcgaacgcggcgcacagctgcgcgctgtcgagcacgacgctgtcgttgccgcgggccagctccagctcgatgatcgagcgcagcacctgctcgctgcacgctttctccggctgcacgcagccgagcagcgcctgcacgggtgcgtcgggatagctgcagtagagtccgtagcgccgcgcggcgatgccgtagccgttggcggcgcgcacgccgggtgtgcacagcacgctcgcacgctgcagcagcttgccgacgagctgctgcagcgccggcccggagacgccgagtgtcgggatgccgacggccgccgtgatctcctcgcagaaaacgcccgcgctgtccggtgcggcgatgaccgtgcagccggaggcggccagcacctccgccgctgcgcgcagcttcggcaggggcggctgtgtggacgccccgcacagatacggttcgcagtccggcacggccgccgggctcagcggcagcaggacggcgtgttctccgcctagcgcctgcacgcggcgcaggaactgtgtgatggcggccgggtctgcgccgagcacgccgatgtgaggctgatcctgtatctgcatgatggacatctcctgacgaaaaaagtctccgcgaagcgggtatgaccccatcttagcggagactgtgatccgtccggcaacgctttggcatcgaaacggcatcattgtgcgttgaaatacaaagtattttccacacgccacgccggcagggaaaaggccgtgtcggcgtccgggtcataaaactgcaggtattcggtgatgctgctgtccatgccgtcgttgtaactgccctcgtttccggcgttgagcagctgcaggggaacggtgtttccaccgcttgtgcgcagaccgagcatttttttcgccgcttctggcatcgggatctgcacctcgtcgtacggcacgccgagcgcggccgcgaccgtggcgccgacgcggttttcaaacacgcacagcaggtaatcccacaggtcgttctgccggatctggaagccgaagtcataggcaaattcataactgagcgccagcacgcagccggtcgcgtcgtcgagcaggaacgacgccgtgtcgccgcgcggattgctcagcgtgatgccccagaggacgaagccgctgccgtagttcgcgtactggacggtcgcgccctcctgcacggaaaagccgccgccgaacagcgcgctgtccttttccagcgcgcccagcaggtcctgcgcgtactgcgccatctcggccagcgtgtgcaccgcggcgctctcatcgagctcgacgggctcttctgtgccgtaaaacaggttttgtatgccatcggtcagcttcaggcgcaaaacggtggccggactctgctcgtcgccggtgctgagggaaaactccgcgtcctgattgcggcggtcgagccgcgccgagacgaagttcggcaggaaaaatccgcccgccgcgatcgccagcatgagcacgagcgccagtgcggtgttgagccagcgtttcatacacggcctcctttcagctccacggtcacgaccgtgccgttgccgacgcggctttcaaactgcattgtgccgccgtgcagctgcacgatctcgttgcacagcgacaggccgaggcccgcgccgccctgtgcgcgcgagcgcgacttgtctacgcggtaaaacgcctccgtcaggtgcgcgagcgcctccggcgggatgccgcggccgttgtcgagcacgcgcacgcggcagccgtcgggcagcatctcctgccagacgtagatgttgccgccgctgtcgagcgccttgcgggcgttgtccatgaggttgacgagcagggtcttgaacaggtccggctctaaaaagcacgcgccctcctcggtacggtactgcagggcgatgcctttttgcgcgtacaggcgcttgaggtgctcgagcagccccgccacgagatcggcgggatgcgcgggcacgagctggagctttgactggtcgagcgagagcatatccagcagcttcagccccagcgcctcgagccgcttgccctcggaaaaaatatagttcgccgcgtccatctgctcgtccggggtgagcacctgactgcgcaaaaggtctgcatagccgatgatggaggtcatgggcgttttcatctcgtgcgagaagtcggccatgaaccgctcctgcagcgccatggtctcctgaatgcggttgacgttgcgctcaagctgcccggccatgcggttgaagtcggcggcgagctgccccacctcgtcgcgcgagcgcacgggcgcccgatagccgaggttgccgcgcgccagctctcttgacgcgcgtgaaagcgtgccgagcgggcgcgtcagcagataggacgtgacccacgacacggctgcgccgatggcgatgaggatcacgaacgtcgtgtggtacgcgcgctgctgcgtctggcgcacggtataggtctccgtcacgtcgaacgcgagctggacggtcgtgccgtcggccgtggcgccgagcatgaggtagtgccggccgttgccggtgtgcacgatgctggtcacgccgctgccggccggaggctcgggtgcttcgtcgagcagcgcagtgtcgcccattgtggtcatctgtgcgccgaatcggatgcgcgctgccgtgctcgacccgccgctgccgagcttgtgcagcacgagcgcgacggtgttggccgccgtgccgggcgaggcgttgtcgccgagcagatccagcacgtccacgaccatgcggtaggtctgcacggcggcgtcgcgctcgcggtcgatggaggaggaaaacgactgcgcgatcatcaggctgccgccgatgccgtaggtcagcgacagcagcagcaccatggcgatggtgagctttgcgcgaaatttcatccgctcatacctccagccggtagccgaccttgttcacggccaacagccggttttcccagccgacctttttgcgcagccgctggatgtgcagatccacggtcttgctgccgtagctgtattcgccgccccagacgtgctcgtagatcgtctcgcggtagagcgcggtgccggggttgcgcgcgaaaaacagcagcaggtcatattccttgtgcgtcaggctgatctcctccgtgccgcgccagacctgcatggcgcgcgtgtcgatgcgcagcccgccgatctcgatcacggcgtcggtcttgttgtagcgccgcagcacgacgtccacgcgcgcgagcagctccacgacctcaaagggcttgacgatatagtcctccgcgcccatgcgcaggccgcgcacccggtcgtcgactgagccgcgcgcggtcagaaagatgaccgggatgcccagcgggcggatatactccatcagctcgaagccgtcggcgttcggcagcatcacatcgagcaaaatgagatcaaatacgttgcgttccagaatgtccgccgcggccagcccgtcatagacgcacgtgcagtgatagcccgcgcgggtcaggctcatctggatcaggtcgcagatcggcttttcatcgtccacgatcaggatctggatcatgccaccgcctccttcgagtcaaaattacatccgtttggcatcaaaacggcatccgaatccgatgcccggttcgattataggagcggccggtgtgtgtgtcaaatgtttcgtgcgcccagtcaggtttttcctgagttggggaaagatgtgcaaatattcggcgcttttgccgaaagcaatcttgcgattcgtgaaaattcatgataaaatgacaaaatattatatttttctatcgaagtttcggtcatgaatcgcagcacaacatcaaacaacaggcgaaatcaaggaaacggttgctcttttctgtcgttttcaacggcaaaaaagcaacggaggggggaaaaacatgcatagatcccattttgcggacagggtccgggcctttctgctggcagccgcactggtgtcggcgctgatctgcccgcaggcgctggctgcggacgcggcggggagcggcggctgcgcgcacggccacacgctgacgacctgccgcggcggaaagtccgtgtgcgcggtctgcggggagacagtcgacatccgggccgcgcagtacaccggctggctgacggtcgagggcacggccgaccggatgtatttcctgtccggcgagcatgtcaccggctggcagcagctcgacggcgggacgtatcacttcgacgatgacggcatcgttcacgacacggagacggtcgacacccgcacctgcaccacgaacggctatgccatcaccacctgcaggacctgcggcgagacctgccgcagcgcggtgctccgctatgcgggccacagctgggatgctgatcatgtctgcacgaagtgcggcacgcagggaaagaatattgccgatgcgcaggtcaagaccgcgcccgcggtctataacggcaaagatgccgtctgcgccgttgcggtcacgtatcagggcaggcagctgacggtcaggaccgacgaagcggacgtcgatggctgcatctcctatacgaacaacacgcgcgtcggtctcggcaccgtctcgatccggggcatgcgcgacttctacggcacggtgtccgcgcagtatgagatcctgcccggcggtgtccgggacgcggctgcggccgagatcggccagaagcaggtccgtctcgactggacggcggccgctggtgcggaaaactaccgcgtcgagatgagcgccgacggcggcagcacctggaccgctctgcccctgaccgcaaagcccgtctgcatcgtcacgggtctcgcgccggcaacggcgtacacgttccgcctggccggctgcacgcaggtggacggcaggtggtatttctcgccgtactactccaacacggtcacggtgacgacgctgccagaaggcgcgtttgcaccgtccgaactgctcggcacgatcgacgcgcaggtggatgggcgtaccgtgaccggcctgagcatggacgcggcgcagtatctgtttttgcccgcgagcgcggatctgagccgcctcgccgtgacggtgcacacgcaaaactgcacgaacccgaccgtggagctgcagggcagcaagggcatagaaccgctcggcgagaccgtcaacatcacagagcttgccgccgcggacgacggcctttacacgctcaccgtccgcatcaacggcgaggcggccggcacgctgtgcgtggcgcagtccgagaatctcagcgcgctttacatcacgagcgaagatccgtccgcacagggccgagcctttgtggatgccggcgatgccaacgccgcggcgcagctgctgctggccgaccgggacggcaatgccgtctgtgacggtgtgcgcacgcagctccgtgcgtgcggcaggaccgaccctgcggccgccgggaagcggtcgtatcagctccggctcgaccaggcgtgtgatctcgccgcctgcggggaagcggctgagcgctggacgctgctggcctgctgtgacgacgcaacgcttttgcacgacaagctcttccgggagcttgccgtgtcgctgggcatgccgtacacacccgcggccgactgggtggatctgtactatgacggcgtctaccgcggcacttatcttgtcagcgagacgaacgccgtcggcagtactggtgtggacatcaccggcatggagaccgcctacgcggccgtcaatgcggactacggcagcgatatgaccacggccgcggccgagaaccggtacggccggacctaccggtacacggccgggctgaccgagcccgccgacatcaccggcggctacctgctcgcgcgtagcgacaccgccaaggcaaagcaggacgcggccaacggctttgtgaccgcgcgcggctgcgccatgaatgtccagagtcccgcgtggtgcggccgggacgccatggcctacatcagcgagtattatcaggcctttgaggatgcggtctacgcgcaggatgccgccgggaactacaccggctacaatgccgagaccggtaagtactattatgaatactgcgacctgacctcgctcgtgcaggtttacctgctgcagcgtctggccgccgatgcgtgtgcggtcggcgtctcgctatccttttataaggatgccggcggtctgctgtacgcaggccctgtttcggatatggagctggcctgcggcgatatcggcgcggacgatgactttgacggcgggcgctacctcgtgtccgcgctcctgcagatccccggcttccgcgcggccgtcggcaattactgtcacgatacgttcctcgcgcaggcgcagcggcttgtgggggacggcggcagggtcatgaccggcggcgcacacctgtcggccagcgccgccatgaatgaccggttgtggccgcttatccgcgccggtgatcgtgcctggccggccggcacgacgtatgccgataccgtggcggacatggacgcctggctcaccgcgcgcatcgcgcaaatgcgcgccgcctatgcccacacgtgggacgccggcgtcgtcacgcgggagccgacctgcacatccaccggcacgcgcgtttacaccagcgatgccggcgagacgatgaccgagaccatcccggccagagcccacgcgcctgaggcgctcccggccgtggcggccacctgcaccacgccgggcctgaccgagggcagccggtgcgccctctgcggcgaggtgctgacggcgcaggagaccatccccgccgcgcaccgctatgtcaacggggtctgcaccgtctgcggggcaagagacccggtgtccgctccgtgccccggcggcaaagcctgtccgggcagcagattcaccgatatgccgcccgcgggcaactgggcgcacaacgccattgacttcaccgtggcgcacaagctctttgccggcacgtccgacacgacctttgaaccgagcgcacggctcacccgcgccatgatcgtcatgatcctctatcggctcgagggcgagcccgccgccgcggcggaaagtgccttcaccgatgtgcgcagcggcgcctggtatgccggggcgatcggctgggcggcgggcagcggcatcgtgaacggtgtcggcggcggccggtttgatcccaacggtctggcgacccgcgagcagacggcggccatcctgtatcggtacgcccgcttcaagggctgtgatctggatgcctgcggcgacctgtcggcgtttgcggacgcgggcagcgtgtccgcttttgcgcttgcgcccatgacctgggcggtgggcgagcggctgatctccggcaatgccatcggcggccggacgcttctcgatccgcagggcgtgaccacacgcgcgcagtttgcgatgatcatgatgcgctacattttgaacgttgtccagccggcgcctgagccctgacagccgctgcaacagtaccggcagtccggcatcccggagtggtttttccgctccgggatgttttttcgccgccgttcggcagaaatcgcggaaatccctgccagactcttgacaaaatcgcgcccgccatgctagtctttttcactagggaaatgaattttgacagaaaggcaatggcaatgacattaaatgaattgaagatcggttcctcagcagtcatcacggccgtcggtggggacggcgcgctgcgatgccggctgttggacatggggctgacaccccggacgcgcgtcactttgcagaaggtggcgccgatgggcgaccccatcgagatccgcgtgcgcggctatgaattgacgctgcgcgtagaagaagcgaagaagatcgaggtcgagggggtgtcggcatgatctttgcgcttgtcggcaaccagaactgcggcaagacgacgctgttcaacgccctcaccggttccaaccagcacgtgggcaactttccgggcgtgaccgtcgaccagaagatgggcgagatgcgcgacgagaagggctgctccgtcgttgacctgccgggcatctactccctgcgtccgtatacgcaggaggagatcgtctcgcgcgattttatcatcaaccagaagccggacggcatcatcaacatcgtggacgccacgaacatcgagcgcaacctgtacctgacgctgcagctgctcgagctgcgcgtgccgatggtgctggcgctgaacatgatggacgaggtgcacgccaacggcggcgccatcgacgtgcagaagatgagccaggcgctgggcatccccatcgtgccgatctcggcggcgaagggggagggcgtgtctgagctcgtggatcaggcgctgaccgttgcgcgcagccagacgctgccgaaggtgacggacttctgcgcggatgattcggccgtgcaccgctgcatccacgcggtcgtgcacctgatcgccgaccatgccgaccgtatcggcgtgccggcgcgtttctgcgcggccaagctcatcgagggcggggacgatctcgcgcagtcgctcgcgctcgacgaaaacgagcgggagctgcttgagcactgcatcgtgcagatggaaaacgagaccgggctcgaccgcaacgcggcgctcgcggacatgcgctacacgttcatcgagggcgttgtggctgcttccgtggtcaagtgccacgagagcaaggagcacgcgcgctccatgaagatcgaccgcatcctcacaggcaaatataccgccctgccgatgtttctcgtcgtgatgttcctcacgttttatctcacgttcaacgtcatcggccagtggctgtccgacctgctgcagctcggcatcgacgcgctgaccggcgtcgtggacgccgcgctcacggcctacggcatcaaccccgtggtacatagcctcatcatcgacggcgtgttcgccggcgtcggcagcgtgctcgtgttcctgccgatcatcgtgacgctgtttttcttcctgtccattctggaggacaccggctatatggcccgcgtcgccttcgtcatggataagcccctgcgcaagatcggcctgtcagggcgcagcatcgtgccgatgctcatcggcttcggctgctcggtgccggccatcatggccacgcgcaccgtctcgtctgaccgcgaccggaagatgaccatcctgctcacgccgtatatgagctgctcggcgaagatctcgatctacgcctttttcaccgcggcgtttttcccgcgctaccgcgcgctcgtcatgctggggctgtatgtcctcggcatcctgatcggcatcctcgcggcgctcatcatgaacaagacggccttccgcggcaagcccgtgccgtttgtcatggagctgccgaattaccgcatgcccggactcaagagcgtggcgctgctgctctgggagaaggcaaaggatttcctccagcgcgcgttcacggtcattttcctcgcgacgatcatcatctggttcctccagagctttgacacgcgcctgaacgtcgtggccgacagtgccaacagcctgctcgcgctcatcgggcagttcatcgcgcccgtcttccggccgctcggcttcggcgactggcggtgcgccacggcgctcatctccggctttatcgccaaggagtccgtcgtcagcacgctgcaggtgctgctcggcggcgcggccatttcgtcgctgctcaccacgcgctccgccatcagctttctcgtgttcacgctgctgtatacgccgtgtgtggccgccatcgccaccatccgccgcgagttggattcccggctcaagacggtcggcgtcgtggttctgcagtgctcggtcgcgtgggtcgtggcgcttgccgcgtatgcgatcgcggggctggtgtgatgcggctgatcgactatctcctgctggccatcgtggccgtgtgcgctgtgatcgcgtggcgcgtctggcgccgcgccatgaaaaagggcggctgctgcggcagcggctgcaccggtaactgcgcgcagtgcggcagaaactgtgactgcaaaaaagagaaatagataaaagcaaggcttcccgaattcgggaagccttgcttttttctatgcgtgtggccgcgctcacagctccgcaatatgcaccgggtttccgtgctcccggatcagggccgcgagatcgtccgcgcgcagccacacggtggccgtgttgtcgttcgggtgcacgccgatgagccccggctcagcgaaaaacgcggcgtcgaggtagagctgcgatgctgcaaaagcgcgcatgaacccgtcgcttacaggccggcgctgatattgcccgcatcctcgacaccgacggaaaacggagaaactcgctgtggagcgctttgggagagcggtactgccgctcgccgttttcgcccggaaacacgatggggctttcggtgtgctcctgcgatttgattttgaaacgcaaaagccggagcaggcgatgcttggcctgctccggcacatggaaatgctgtgctgcaattatgattttgcgagttcggcagtgatcgcctggttaaacgcatcggcctgtgtgtcccaatcggaatactccggatcgtccttgtggcttggcagcaggctgttgtcagacagataatcgccgagcacagccgttactttttttgcgccaaaataattcaggtgatccccctggtcacgggtatccgtgctccagttgatcgacacctggtcggacatggtgttgaagtcgatgaacgggatctgcagcttatctgcgagcgcctgcgtgctgttgtggcgcgccatgttccagttgactgtgctgggcgtgctgacgagcatcagctgcgcgccgttttcgtcacagaaggccttgatgcgctcaacataggcgcggtttcgcttcgggatgggagcgtaggcatccgatggcgtcatataattgctggcgtccgccggagtggcgttgcagcgcagctgataccctttggcattttcggtgtgggtgtaattgacggtcatgcgccagtcatttgccttcagagatttccaccggtcgtggtaggaaaacacagggaagaggtcgccggcctcctgcagcagcatactgccgtacgaaaaatcgatgaaaatcacatcggtctccaggatcacaagcttgggcgactgcttttggaaggctttgtgcaagaacgcttccgaatagtacagtgtctgtctggatgtgccgcagcagtaggccgtgtaaccgtattgctgccacagctgcatcgggatgaaggcggaatagctctcgctgtcaccgaggatgagcaggtcgatcgtgttgtccggttctccgaggatgccgttggccgcggggtcatggatgccgtcgctgcgggtgttgttttttggccgcaccagctgcgacacaccggtcagcaaaagcgccagcacggcgagaaaaacgacgcatctgagcgtatgtttgagaaaacgggacatgcgtgcctcctaaaagttcgcatacatggggtcgacgggaatgtagccctttccgtatgctccgaaaacgatgatgaacaaaatgagcgcgtagaagaccgtccagcgtactgcagcagggcgctgtgccagcagcgcgcgcacggacttgcctttttcgttgatcacgctcacgacgaacacgatcagcagtgtcacagcaacgatcatgaggtcaaacttgtcaataccgagcgccttgaagagcgcatcgtcaaagacggggaatgcaaatccggtgaccatggtgcggaacatctgcatacctgcacgcaggccgtttgcacggaaaaacagctcgccgatgatgaccagcaccgtcgtgcgcagcatctgcagcagacggtacgggaagctctcggcgcggatgtgcagccgcgcgttgacggcccgcaccggcggggcgatgatgttgccgccgaggatcaacacgaagtggtacatgccgaaaaagagatagctccacgcggcaccgtgccagagaccgttgcagaaccacacgcaaaagagcgcgacggcgctcgccagcagtggaccgtagtggttgccgaggcgtttgcgggcggcggaagtgagcttttccagtggcttgagcgtgacgaccgggtagaatacatagtccttgaaccaggtgccgagcgtgatgtgccagcgcttccagaattccgagatcgtcttggagaaaaacggttgtcggaagttttccggcattgtgacgccgaggatctgcgccgtgccggtgacggcgtccatcgagcccgaaaagtccatgtacagctgcacggtgtagcacacggcagccagtgcgatcacgccgccgtcaaagtcggtgtagttattaaagacatttctcacgagcgggttgagccggtcggcgatgatgacctttttcatcatgccgtaggcgatgcgctgcagaccgagcgtcaggttctcgtaggtgattggctttgcgtcccagagctgctgcgcggtctggtcgtagcggcagatcggcccttccacgatctgcgggaagaagctgatgaacagcgtcaggcgcagcagattcgtgtccgcttttgtgacgccgcgctgcacgtccacgatgtaggacagcgcctgcagcgtgaaaaaggagataccgatcggcatcacatacttcgggatcgccagctgcacgggaatgtgcaggtgcgccaggagcgtgttgacattcgtcgcggcgaagccggaatatttgagtgcgaacaggacgccgatgtgcaaaatgacggccagcaaaaggatccggtgctgcacggcctgctgacgcttgcgcacggtcttgcgctcggctttttctgtctgcgcgagcagaagcttcgtctccgactgtattttgtccagccacagtccgaagtagtgcatcgaaagcgccgtcagaagcaggtatacgagcagcttgccgctgatcagccagaaaaaggcgcagtcggcggcgagcaggaagtattttttcccgcgccgcggcatgagactgtacaccacaagacaaaacggcaggaacacgacgagaaatgccgtcgagaagaaggaggtcagggcgctcccttttcccgcgaggaacaacgaagaaagctccatttcagtatccctcctgcaggcgcatgcgcctgcctgctgttcgttttacgttccgcatgatctggcacagagcatccggggcgctcttttgcgggcaatgaggctgttttgccgtccttgccggagaaaaggatacgaccggcacggaccggacgggcgctttctgcgcggccggcatgccgtttgtacgattttcgattgcccatcttcttacgcttgtcatttgctctgttctcctgatggcgttttttgttctgcggccaatattatagcaagaaaagcatacggcggcatcttaattagtcttaattcttgggacgttcgcgctgtcgcatagggccggatgtttgtatgttctgcgcgaaaaatgcaccggcgtgcagaaaaacagcgcattcggcgcgctgtgcgaagcatccggcgcttttcccatttgcggcgcaaatatttccggccgaagatattttgcgcgttgcgcagaaatgaatttcatggaaaaaggacctgctgaaaagcaagtccttttcttggtggagatggagggagttgaaccctcgtccgaaagcgctttgacaggaacttctccgggcgcagcgggttttttcgggacgctgtacgcccctgttcccttcaggacaggcaaaccggcaagcctgtccgtccggtagcttcatgatgcatggcacgcgcaaagcttagcgtgcgcacgttcaccactcatcgacgctccgctgccgggccgtggtcctcccggcgggaacgctcgctaattaagcagcgagaagaacagtttcgttgttgttctttaatttataaggtgcccgttttatggcggtcaggcgccgccgcccgctattcctgcctccacacccccgtcgaaaccggtacatccccatgatgtcgggcgcgtcggccgcctgcgccgctctcgcggcgcaggcaggaacgcattctgaaagatcagacgaaactgccgatgatttgttccctcagcaggtctccggctccggatactcgacgccgaaggtctcgaccgtgacggtcttcatcttctgttcgtgggtgggcttgtcgttgaacatgctgcgcggggtgcgcgcgatggcgtcgaccacgtccatgccctcggtcactttgccgaacgcggcatactgcttgtcgaggtgcggggcgtccatgtgcatgatgaaaaactggctgccggcggagttcggatccatggcgcgggccatggacagcacgccgcgggtgtgtttgaggtcgttttggaagccattgctcgtgaactcgccctcgatgctgtagcccgggccgcccatgccggtgccggtcgggtcgccgccctggatcatgaagccggggatgacgcggtggaagatcacgccgtcgtaaaagcccttcttgacgagactgataaagttgcggacggtgttcggcgcgatctccggatagagctcggcgcggatgatgccgccgtcttccatttcaatggtgacaatcggattgctcatcagtaatttttctcctttatcgttctgtcgatctcgcgtttggcgctgcgctgcgcgtcggcgtcgcgcttgtcatagagctttttgcccttgcacaggccgagctccaccttcacgcggctgtccttgaaatacagcgacagcggcacgagcgtcagcccgtcctgcttcgtgcgggcgtagagcttcgtgatctcccgccggtgcatgagcaggcgcttcggccggtcggggtcgcggttgtagatgctgccgtgctcgtaggggctgatgtggatgccgtaggcaaacagctccccgtttttcacggtgcagaacgaatccttcagattgaccgtgcccgcgcggatggacttgacctcggtgccgaagagctccacaccggcctcgaaccgctcgagcacgaaatagtcatgcagggccttgcggttggccgcgacctgtttgacgcccttggctctcggcatggcggggacctccttcgtgcgaaatcgtggatatagtttagcacatccggtggcaaatgaaaagagcgaaatcagcagaaatagcgctgaagcgtcccgacggcgtcacggcgggcgaccacgtcgccgtgttcgcctatgtgtgcgtacagttcctcggtacacggcagcggctcgccgaactcgaagagcgcgttcggcagcgcctcgtccccagtgcgcacgaacagctcccagccgccgtctatgtacaccacgtccgagtcgagcccggccggaaaacagcccagcgccgcggtcaggtcggcaaacgagtggaaccggaaccggcgcggcggggtggaaatgggtcttgcgatgagcagcacctccttttcggcaacgaacagttcgatcttcatacttgtccagggcgcgagcccgtgcgtctcgagcgcatggtcgacggcggcgcggatgtcggcctcgcgcagcgcggcccactcggcgcgcgtgatgcgcatggcgacggccgcggcgtcagcggtttctaccagcatgggaatgcctcccttggtgtcggtttccggacaggcgtccggttagatccagtatagcgtccgagcccgtgttttgctactcaaaatatatggtaatcggcgcaggaatatggtatcattccatttgaaaaaaggagtggatgtttcatggaactgatcgaacaaaagctcaagaccctcacgagctaccacggtgtgatcgtcaacgtccggctcgacgaggcgcgtctgcccgacggcagcacggccaagcgcgaggtcgtggagcatccgggcggcgtgacggttctgccgctggagcccgacggcacggtctggtgcgtgcggcagtaccgctatccgttttcgcgcacgctgctcgaggtgccggccggcaagctcgagccgggcgaagcgccggagctggccgcggcgcgcgagctctcggaggagacgggcctgacggccggccggatgcagtatctgggcgcgaactttacatcgcccggttactcggaggaggtgctgcacatctatctggcgcgcgacctgcaccgcggcgcggcgcacctcgatcccggcgaatttctgaacgtggagcggcatccgctggaggaactggtgcagatggcgcttgatggtgaactttgcgacggaaaaacgacagttgccctgctgaaaacgcagcttttgctcgcgcgcgagcgcggcgaggcggcaagtggcgggttgtgattgcttttcgggaaaaagcatgctataattcatcgttaggttccgcaaaaatcgggcaagctacgcacggagcgtattcgcccggtcacagatgcggagctgcactctgctttcgcagcatgagaggtgtcaaatagtttggatagatatgtaatacatggcggcagacccctgcacggggagatcgagatcagcggcgcgaaaaacgcggccgtggcgatcatcccggcagcgctgatggtcgacggtgtctgccggatcgagaatatgccccagatcagcgacgtggatatgctcctgaagatcctgcaggggctgggcgcgcgggtggaatacctcagcccctccgccgtcgagatcgactgcacccaggtgcgcttcaccgagccgccgtatgacctgatgcgcaagatccgcgcgtcgtactatttcatcggctcgatgctcagccgcttcggctcggccaagacgaccatgcccggcggctgcaacttcggcgtccggccgatcgaccagcacatcaagggcatgaccgcgatgggcgcgaatgtcgaggtgaaaaacggctttgtctatgccgacacgccggacggtcgcctgcgcggggcaaaggtatatctggataaggtctcggtcggcgcgacgatgaacatcatcatcgcggcgacgcttgcgcgcggccgcaccgtgatcgagaacgcggcgcgcgagccgcacatcgtcgaccttgccaacttcctcaactccatgggcgccgacattcgcggtgccggcacggattccatccgcattcagggcgtcgagcgcctgcacggcggcacgtacagcgtcatccccgaccagatcgaggcgggcacgtatatggcggcctgcgccgcggccggcggggaagtgcgcctggcgaatgtgatcccgcgccatctggagtgcatcagcgccaagctgcgcgagatgggcgtcaccgtcgtcgagggcggggacagcgtgctcgtgcgcagcaacggccgcctgcgccatacgaacgtcaagacccagccgtaccccggcttcccgacggatatgcagccacagatcagcgtggcgctgtgtctggccgacggcacgagcgtcgtgaccgagggcgtgtatgacaatcgctacaggtacattcaggagctcggccgcatgggcgcggacgcgcaggtggacggctgcaccgccatcatcaacggcgtggagggcctgcacggcgcggaagttcgcgcatgcgacctgcgtgccggcgccgctgtggtcattgcgggcctgtgcgccacgggggagaccgtggtcacggacatccgctttatcgagcgcggctacgaaaacttcgtcggcaagctgcgcggcgtcggcgcggacatcgtgctcgagcgcgacggggccgagcagtgcgcggcggccgctgccgaatgaacatcgcgctgtttgccagcgggtcgagcggcaactgcgcgctcgtgtccgacggcgagacacatattctgatcgacgccggcatctccgcgcggcgcatctgcgcgggactcactgcgcaggatgttgcgccggccgacctcgcgggcgtactcgtgacgcacgagcactccgaccatgtcaagggcctggccgttttgctgcggcgcgaccccacggcggtgtatgcgctgccggcggtgtgcgctgcgctgcgaaaattgctgcctgagcggacggactgcctgcacgagatcgcgccgggcgagccgttttgcctcggcgatgtgcgcgtgacaccgtttcccacgccgcatgacgcggccgggagctgcggctaccggctcgacgggtcggcgcgcttcggtttctgcaccgacctcggcaccgtgacggatgccgtgcgcgcggcgctgtgcggcgtggactgcgccgtcattgaggccaaccacgacccggaactgctgcgcaccgggccttacccgatctatctcaagcgccggatcgcatccgatcacggccatctgtcgaatgaaagcgccggggcgctggcggtgtacctcgcggaaaacggggcgcagcagctcatcctcggccatctcagccgggagaacaacacgccccgcgccgcgctcgagaccgtgtcactcgcgctcgcggcggcgggctttcagcccggcacgcagccggagctgtacgccgccccggcggagacgacgctcgcgctcacggcgggaaaggcgtgcgtatgctgtcgataaccctcgtctgcgtcggaaagatgcgcgagacctattatatctccgcgttcgcggaatatgccaagcggctgggcgcctattgccggtttgacctggtggagctgccggagcagcgcctgccggagcgcccgtcgcaaaaagagatccacgccgcgctggaaaaagaggcgcaggccatccgcgcgcgcatcccgaagggcgcggccgtgatcgccatgtgcgtcgagggcaagctcctctcgagcgaggcgctcgcgcggcagctcgccggttacgccgcgggcggcacgtcgaaggtgtgctttctcgtcggcgggtcgttcggcctcgacgagggcctcaagcgcgaggcgtcgctgcggctgagcatgtcgccgatgacattcccgcaccatctggcgcgcgtcatgctcgccgagcagatctaccgcgcgtgcacgatcaacgcgggcacgcaatatcataaatgaaacaggagaaacaacatggcgcaagagctgaaagcagagtggggcagatcacttcccggcgatctgctcaagcgctggccgcgcgatgcggacggcgaactggtgcccccggcgctgctgaccaagtgcacgggcgtggatatggacgacgtgctgctggtcaatatgctggaggcctatggcatcccctgcctgaaaaactatcccggggacggtcagtttggcaagatcatgttaggtatgtccggttacggagtggaaattctggttcctgagacgctgcttgccgatgcgcaggcacttcaggaaggctgcgctgaggcgctgacggaaggagacgacaatgcgtaattatatggaagaataccagcgctggctcgacagccccgcgctctccaatgcggaatgggaagaactcaacgccatccgcgacgacaaaaaagagatcgagagccgctttttcgccccgctcgagttcggcacggccggcctgcgcggcgagatggcgctcggctgccgccgcatgaacattcatgtcatccgccacgccacgcaggcgttcgcggaggtcatcaagtccgagggcgagagcgcgtgcgcacgcggcatcgccatctgcttcgactgccgcatcaacagcgagcgctttgcgcacgaggcggcgggcgtcatggcggccaacggcatccacgtgcgcattttcgacgccctgcgtccgacgccggagctgtcgtttgccgtcaagcactacggcaccacggccggcctgaacatcacggccagccacaacccgaaagaatataacggctacaaggtctactggtccgacggggcgcagctcccgccgcagcacgccgccgccatcgccaggaacatggagcggctggacatcttcaatgacatccagcgcatggactttgacgacgcggtgcgtcagggtcttgtggagttcatgggcgcggagacggacgaggcgtttttgtccaacgtcctgcgccagccgatcgacccggacgttgtccgccgcgtggccgaccggttcaagatcgtctacacgccgtttcacggcgcgggctggcacctcgtgcccgaggcgctgcaccgtctgggcatgacgcaggtcatccccgtcaaggagcagatggtgctcgacggcacgttcccgaccgtcaagagcccgaacccggaaaatccggagggcttctatctggccgttgacctcgccaaggaggtcggcagcgacctcatcctcggcacggatccggactccgaccgcgtcggcgtcatggtccgcggcgcggacggggagtaccacaccatcaccggcaaccagatgggcgtgctgctgctcgactatatcattacggcgcgccgccgcaagggcacgctgccggaaaacgcggccgcgatctcgacgatcgtcacgtccaaaatggtgcgccgcatctgcgatgtgaacgacatccactttgacgagacgttcacaggctttaagttcatggccgagaagctggccgaataccagcgcgacggctcgtatcagtacgtgctcgccttcgaggagagctacggctacatgatgggcgactatgtccgcgacaaggacgccgtgaccgcctgcgtgatgatcacggagatggcggcgtactacttcgagcagggcatgacgctcgcgcaggcgctcgacgcgctgtatgaaaagtacggcttctacggggagcgcacgctcaacctcgtcatgccgggcctcgacggtctggagaagatgcgcgcgctcatggcgcagctgcgccgcgagccgctgcaggagatcgcgggcacgaaggtcgtgcgcatgcgcgactatcaggatggctcggtgtacgtcatgggcctcggcaagatggacaaaacgcccatctccggctcgaacgtactgtattttgagctggacgacggctgctcgttcatcgtccgcccgtccggcacggagccgaagatcaaggtgtacatccttggtgtcggcgcgacgcgcgccgagtgcgacgagcgcgtgcagcgctacgcgcagttcgctgagacgctgcgcggctgaaccgaaaccatttgccccggccctccggcagttttcgccggagggccggatctttgagggagcgttatgaaagagaaactcaaacagctcttcggcctcttcggcgcgttcgccgtcgtcggcgtgacgacattcggcggcggctatgccatgctgcccgcgctgcagcgcgaggtcgtggaaaagcgccgctgggccacggaggaagaggtcatggactggtacgccatcggccagtgcacgccgggcgtcatcgcggtcaacaccgccacgttcgtcgggcagaagcaggcgggcatctggggcggcatctttgccacgctgggcgtcgtgttcccgtcgctcgtcatcatcatgatcattgcggcctttattcagaatttcgcgcacctgcccgccgtgcagaatgccttcgccggcatccgcgtgtgcgtgtgcgtgctcatcctcaacgccgtcgtgaagctgtggaaaaaatccgtcgtggactggaagacgtttctgatcttcctgctcgtgttcgcgggcagcgtgtttttgaatatctcgccggtgctgtatgtgctcgcggccgcgctcgccggcatcgtcatcaaggaactggaggcgcgtaaggcatgatctatctgcgcctgttctgggagtttttcaagaccggcctgttttccgtcggcggcggcctcgccacgctcccgtttatctatgacatgtccgaccgcacgggctggttcacctatcagcagatcgcggacatggtcgcggtgtcggagtccacgcccggtccgatcggcgtcaacacggcgacctatgtgggctacgtcacggccggcgtccccggctcgctcatcgcgacgctgggtctcgtgacgcccgcggtcatctgcatcctcatcatcgcgtcctgcctgaaaaagttccgggaaaaccggttcgtcgaccatgcgttttacgggctgcgcccggcgtccgctgcgctgattgcggcggcgggcttttccgtcgtgcgcatctcgctgatccaggagagcgcctttcaggccagcggccggttcacggatctgtttttctggaaggggctgctgctcgccgccgtcatctgggtgctgacgaatgtcgtcaagccgacgaaaaagctgcacccgatcgtatacatcgcggcgtctgccgtcgtcggcatcgtgttttcgtttgccggcgtgtgagctcaaagaagatttgccaaaacccacatacacagcgcggagatcgctccgtgcagcaggcgcccgaccgtgtgtcgggcgcttttgatgtctgtcccggcgatgaccgccgccgtctgacagtgcacggacacgccgccccagccgatgagaaaggcggcgagggcgagattccccggcgtcggcatcagaccctgcatcgcgccgatgccggtgccgagctcgagcacgcccgtgcacagcgcgcgggtaaagtgcagctccagcccgagccgcgcagcgctcgtgcccaccagcgccggcagcaggccggaggcgtcgagcacaccggtcatgacgctgaacgtgaccacaaagccgctgaccgtcagcaccgcgcgcacggcgctgcgcacggcctccggcagcgcctgcgagagcgacacggccgcgatctgcgaccgatcctccggcagaaagccgccgctgcgcggggcgaagagcatgccgacgatcacggcggacagcacgtgcacgccgtaaagcagcagcccgtagcccgcgctgtgaaacacgcccacgcctgccgcgccgacgagaaacgctgggccggaattgttgcagaatgcgagcgcgcgctcggcctgctcgcgcgtgagcgcgccgctgcgccgcagccgggccacggcatccgcgccgagcggatatccgcccgtcacgcccagcagcagcgccgatgcgcccgcgccgccgatgccgaagagcttttgcgtcacgggcgagagccacctgccgaggatgcccggcagcccgagctgctgcagcagcgacgagaggataaaaaacggcagcagcgacggcacgatcatctgcgcgcagaggttcagccccgcgcgcgcactctcgagcgccgcctgtgagcacagcagcagcgcgccgagcgccgagagcgtcactgcaagcgcgatgtaattgccccgtttgccttccaccggcatccctcccgaaatcggttctcgtgcatttgtatgcctgtcccggcctaaacttgcctgcgggcgcataaaatggcttgcagcgaagggggtgagccggtgaagcggctgtctgatattccgctcgagattgcggagcggctggacctgccggcggaatccgtggccggcgtgccgaagctgaccgtgaccggccggcgccgcgcgctggtggaaaaccactgcggtctgctcgaatacagccacgagtgcatcgtggtcgacggcgggcgggtgcgcgtgtgcatccgcggcacgaacctgcagctcgtggccatggacagcacggcgctgctgatctccggcacgatcgcgtgtgccgaatttgcgtgaggtgatggctttgacgcggtggatcctggccctttgcggctatgcgcggctggaggtgtgcggcgtgcacccggagcgcgtgctcaatgcatgcgcggcggcgggcatcgcttgcacggcgtccgagccggtggacgcctatacgctgcgcatcacggtgcgcgcgcgctgcgcggaaacggcggcagagctggcgcgccggagccagtgcgaggtgaaaacgctctatcgccgcggcctgccgcagctgctgcggcgcgccgcgcgctaccggggcgcgtgcgcggggctgctcgtggcggtgctggcggtgctgacatcgtcgctgttcatctggcgcatcgacgtgaccggcaacgagacgctcacgaccgggcagatcctgcgctgtctggacgaatgcggcgtgcgcccgggcacgtactggcccgcgctgtcgaacgacctggtgcgcaacgacatgatcctgtgcctgccggagctgcgctggctgaccgtgaacgtgcacggcagccgcgccgaggtgatcgtgcgcgaaaaagaccccctgccggacatcacgccggacgacacgcccgtgagcatttatgcctccgcgaccggggtcatcctgagcatggacgtctacgccggcgaggcgcgcgtcgtgcccggcgcggcggtcgagccgggcgatgtgctcgtgtccggcgcggtcacagacctcggcggcggggtgcgcccggtgtgcgcccgcgccgacatccgcgcgcgcacgcggcaggtgctgaccgggcagatcgccctgacggagaccgaaaagcagcccgcgcacggcgcgcggacgcgctgggcgctgcgcgcggggaaaaagcggatcaatttttatcaaaacagtggaatttctgacgcggaatgtgataaaatcatttatgaatatccttttgcgatccggggcgtgttcacgctgccgttttcgctgttgcgtgagcgcgtgcagccgtatcggacggcggacgcgccggtatctgaggacgcggcgcgcacatcgctcgagcaggcgctgctgcagcagctgcgcgagacgatcggcgcggatggcgcgatcatttcctatgaaacggcagcggagactaccggcaacgtgctgaccgtgacgctcacggccgagtgcgagcaggagatcggccgcgcgcaggcgacgccggacgcggaatttttacagcttcggccgccggccggggaagggactacagcagatgattgaaaaaaccatggaagtcgacagaatggaggacgtcatcagcgtgttcgggtcgtttgaccagaacctgcggatgatcgagaccgaatacaacgtgcgcgtgaccgaccgcgacgagcagatccacatcaccggcgaggccgagaacgtgctctacgccgaaaaggccatcgccggtctgctgtcgctggcggccaagggcgaggagatcggcgagcagaacgtgcgctacatcttccgcctcgtgcgcgagggccgggagcagaagatccaggaacttgcgggcgacgtggtgtgcatcacggccaagggcaagcccatcaaggcaaagacgctcggccagcgcgcgtatctggatgccatcgagcagaacacgatcacgctcggtgtcggcccggccggcacgggcaaaacataccttgccgtggcggaggcggtcgcggcgtttcgcgccgagcgcgtcaaccgcatcatcctcacgcgcccggcggtcgaggcgggtgagcggctgggctttctgcccggcgacctgcaaaacaaggtcgacccctatctgcgcccgctgtatgacgcgctctttgagatgctcggcgcggacgcctatgcgaaatatctcgagcgcggcaacatcgaggtcgcgccgctggcgtacatgcgcggccgcacgctcgatgacagcttcatcatcctcgacgaggcgcagaacacctcccgcgagcagatgaaaatgttcctgacgcgcatcggcttcggctcgcacgtcgtcatcaccggcgacgtgacgcagatcgacctgccgtcggacaagccgtccggcctcaaggaggccatccgcatcctcgacggcatcgacgacatcgccatctgccgcctgacgggcgcggacgtcgtgcgccacgcgctcgtgcagaagatcatcgccgcctacgagcaggacgacaaacagaaagaaaaacgcgccgcggccgcggccaaaaagcccgccgcgcgcaagacgactgtgaggaaaaaagcatgacacaggcaaagatcaccatcacccgcacgcgccgcggcctgggctttccggacacgcagcgctatgttaagcgcgcggccgccgcagcgctcagggccgagggcgtgaccgttccgtgcgagttcgacgtgacgctcacggacgacgccgtcatccacaccatcaaccgcgagcagcgcggcgtggaccgcgcgacggacgtgctgtcgtttccgatgaacgagctcacgcccggcgcattcgaccccgatgcctgcgagtgggactatgagactgaccgcgccatgctcggcgacatggtcatctccatggagcgctgcgccgagcaggccgagacctacggccacagtttcgcgcacgaggtcagctatctgaccgtgcactccgtgctgcacctgctcggctacgaccatgtggacgagggcgaggacaagcgccgcatgcgcgcgcgcgaaaaagagatcatgcgtctgctggacgtataaggagaaacgaatgattaccaaaaccgctatgatcaccatctgcggacggccgaacgtcggcaagtccacgcttaccaacgccctcgtgggcgagaagatcgccatcgtctcgaacaagcctcagacgacgcgcaaccgcatcagcgccgtcgtcaaccgcggcgatacgcagttgatcctgatggacacgccgggctttcacaagccgcgcaaccgcctgggcgactatatggtacaggtcgtgcgcgagagcgtggcggacgtggacggcgtgatgctcgtcgtcgagcccattgcctccatcggcgagcaggagcacgcgctcatcgagcgcatccgcacgtccaacgccccggccgtgctcgtcatcaacaagatcgacacggtggaaaagccggagctgctggccgtcatcgccgcctattccgaggcgctgccgtggcgcgcgatcgtgccggtgtcggcccagaacggtgacgggcttgccgagctcttcgacgagcttgcgcagcttgccgtgccggggccgcagctgtttccggacgacatgatctccgacatgccggaaaagcagatctgcgccgagctcgtgcgcgaaaagctgctgctgtgcctcgacaaggagatcccgcacggcacggccgtcgaggtcacgaagttttccgagcgcgataacggcatcatcgacatggacgtgaccatctattgcgaaaaagagagccacaagggcatcatcatcggcaagcgcggcgcgatgctcaaaaagatcggcgagctcgcgcggcaggacatcgagcgcttcatgggcacgaaggtgtacctgcagacgtgggtcaaggtcaaggaaaactggcgcgactcggcagcccagctgcgcaattttggctttaccgaccagtgaccctttattaccagccataaatccaccccgctgtgcagacactatgcccagcgaggtggttcattgtgcaagacgatcttttctggcagctgttcgcggacaccggtgatccgctcggctacctttactaccgcgccgcgcaaaatgcgctggcgcagacgaccgatgagtctgcggcggatgatcctgtccgccgcccggcctgatgaggtacatacgatgtttcttacgacccgcgggctcgtcctgcgcgaggtgcgctacaaagagtcggacaagatcctcaccgtgctcacgcagcacgaggggaaggtgacggtccgcgcgcgcggcgcgctgcgcaagggcagccgcatcacggcggcgacgcagctgctgacgtattcggacatgacgatctttgaaaaccgcggccgccgcacgctcaacgaggcatccacggtcgaggagtttctcggcctgcgcgccgacctcggcgcgttcgcgctcggaagctattttgccgagctgctcgagaccgtctctgccgaggaatatcccgacccgccggtgctgcagctcgggctcaacagcctgtatgcgctcagccgcgcgctctgcccgccggaacagatcaaggctgtgttcgagctgcggctcatgtgcctcgcgggctacgagccggatctgtcctgctgcgcgcagtgcggcgcagcagagccggacgagccgtggttttccccgcgcggcggcgcggtgtactgcgcgcactgccggggcgcaagttcatcggccgtcacgccgctgctgccggagacgctggccgccatgcggcacatcgtgaacgccgaccccaaaaagatcttttccttcacactcggtgacgcgggccgcagacagcttgcgcacgtgtgcgaggattatacggcgacgcagctcgagcggggcttcgcgtcgctcgattactggaagaaagtgaaagattgatatgaagcatatccttatgatcgccaccggcggcacgatcgcatccaaagagacggccgacggactcaccccgcagctcacgtccgaggaactgctcgccgaggtgccggagcttgagcagctgtgccggatcgacaccgtgcagctcatgaaccgcgacagcacgaacatcaacagccgcgactggctgcaaatggcggcctgcgtgcgcgagcactatgacgcttacgacggctttgtcctcacgcacggcacggacacgatggcctacacggcggcggcgctgtcgtacctgattcagaacaacgccaagcccgtcgtcatcaccggctcgcagaagtcgatcttcaaccaggacaccgacgcgcgcgagaacctgcgcgacgcctttctctacgcctgcgatgacggcgcctgcggcgtgcacatcgtctttgaccacaaggtcattctcggcacgcgcgcacgcaaggtgcgcacgaagagctacaacgccttttcgagcatcgactatcccgagacggccatcctgcgcggccggcaggtcgtgtattacatcccggagcaggccgcaggcgcgccgaagttttacaaccggctcgaccccggcgtgttcgtgctcaagctcatccccggcatcgacgccggcatttttgacgatctcaaggcccattaccgcgcgctcgtgatcgagagcttcggcgtcggcggcctgccgtgctacggcgacgagagctttttccacgccgtgcgcgactgggtgcagtccggccgcgtcatcgtcatgacgacgcaggtgccgcacgagggcagcgacatggaagtgtatcaggtcggccaccgcgccaagcgcaagctgggcctcatcgaggcctacagcatgacgagcgaggccgtggtcacaaagctcatgtggattctcggccagacggacgactatgcggagatctgccgcctgttccggacgccggtgcagaaggatcagatctattgaggaggaagcgccatggattttcaggcagaataccgcagcaagctgcgcacgcccgccgaggcggtgcgtgcggtgaaaaacggcgattgggtggactatacgtcgggcctcggcttcccgccgctgctcgatgcggcgctcgccgcccggcgcgacgagctgcacgatgtgaaggtgcgcggcaacctctgcgccggcccggtgcagatcgtcgagtgcgacccggagcaggcgcattttctctaccacacctggcactgctcggcgtatgagcgcaggctctgcgaccgcggcctgtgctacttcacgccgatgatcttccgcaacctcgcgtggtactaccgcgaatttctgacggtcaacgtcgccatggcgtccgtcgcgccgatggaccgccatgggtactttaacctctcggccgtgaccggcgtgtcccgcgccatcctcgaccgggcggacatcgtcattctcgaggtcaacgagcacctgccgcgcctgcgcggcgggttcgacgaggtcatccacatttccgacgtggacatggtcgtcgagggggcgcacgcgccgttcaccgacctgcccgcgcacccggcgacggcagaggacaccgccattgcaaacctcctcctgccgcacatctgcgacggggcgaccgtccagctcggcatcggcggcatgcccaccgtgctcggcaagctgctggcccggtccggcctgcatgacctcggcatgcacacggagctgtgctcggacgcctacctcgacctgtacgaggccggcgtgctcacgaaccgccgctgcacgctccaccgcgggcaggggatgctcggcatcgtgctcgggtcgaagcggctgtatgactgggtcgacgataaccccggcgtcatcgcggcgccgctgtcgtatgtcaacgcgccggagaccatcgcgcagctggacaacatggtgtccatcaacagctgcatcgcggccgatctctacgggcaggtcgcgtccgaaagctccggcctgcgccagatcagcggcacgggcggccagctcgactttctcacgggcgcggccatggcccgcggcggcaaggcgttcatctgcatgacgtccacattcacggacaagcagggcgtgcgccactcgcgcatcctgccgcacttcggcggcgatatcgtcacgtctccgcgctcgcaggcgtattatctggccacggagtacggcgtggtcaacctcgccgggcgcagcacgtgggagcgcgccgaggcgctcgtgtccatcgcgcatccggatttccgcgagcagctcattgcggctgccgagtcgcagaagatctggcggcggagcgccaggcgctaagcgcgcgctaaaatccggcgccggatacagatttcacttgttttcccgcgcgccatcgcatacaatggagaccgataagggagtaattggcgcgaaccttcgcgcggcccagccaacaaccgatccgtaggatctggcccggtctgaaatgatgagacttatctgccgagaggcagataagtctttttttcatttccggggaaactatatcggaatctgaaggaggacaaagccatggaatactaccggcagccaccatcggacaccctgcacgcactcgacagcacgcccgacggtctcacaccggcgcaagccgccgcgcgccttgcgcgcgacgggcgcaatgtgctcaccgaaccgccgaaaccatcgctcgtgaagcgctttttccagcagctggccgacccaatgatcctcgtgctgcttgcggcggcgctgatctcggccatcacgagcgcgtatgcgcacgagagctttgccgatgtgatcatcattctcatcgtcgtcatcatcaacgcggtgctcggcgtgtaccaggagagcaaggccgagcaggccattgccgccctgaaggaactgagcgccgcgcacagccgcgtcctgcgcggcgggaagctcgtcaccgtccccagcgaggaactggtcgtcggcgacgtgctcgtgcttgaggcgggcgacgccgttccggccgatgcgcgtgtgctcgagagcgcgagcctgcgcgccgaggaggccgccctgaccggcgagagcgtgccggtgacaaaatcgcccgacgcgctcacggccgccggtgacatcggtctcggcgaccgcagcaacatgctctatctcggcagcagcatcgtctacggacgcggccgcgccgtcgtcacagagaccggcatgcagacgcagatgggccatatcgccgacgcgctcacgcagacaaaggagaataagacgcccctgcagctgcgcctgacgcagctgagccgcatcctgacatggctcgtgctgggcatctgcgcggtcgtgttcgcggtcggcgtgctgcgcgccgggaccatcaacggccgcgtcgtgctcgacacgttcctgatcgccgtcagtctcgcggtcgcggccattccggaggggctggccgcggtcgtgacgatcgtgctgtccatcggcgtgacgaacatgagccgccgtggcgcggtcatccgccggctcacggccgtggagacgctcggctgtgcgcaggtcatctgttcggataagaccggcacgctcacgcaaaaccgcatgactgtgacggagtgcgcgggcagcgacgaacacctgctcgccacggccatggccctgtgcgtggacgcggtgcatgacccggagacggacaccgtgaccggtgagccgaccgaggccgcgctcgtgcgctgggcggtcgcgcagggcctgtcgccgagcgcgctgcgcgcgcagtatccgcgcgtggccgaggcgccgtttgacagcgaacgaaagatgatgagcaccctgcacgccgatggcagttccgtcgtgcagtataccaagggcgcgcccgacgtgctgctgccgctgtgcgaccggatctggatcgacggtcgcgccgagcccatgacggacgcgcaccgcgccgagatcgcggcgcgcaatcacgccatgaccggcagtgccctgcgcgtgctggcggcggccatgcgcacgtatgacgcgctgccgggcgacacgtcgcccgcggcgctcgagcagcacctgtgctttctcggcctcacgggcatgatcgacccggtgcgccccgaggtcgtggacgccatccgtgcctgccgcagcgccggcatccggcccgtcatgatcaccggcgaccacgtggacaccgccaaggcgatcgccagggagctcggcctgctcggcccgggcgacgaggccgtcaccggcacggagctgagcgccatggacgatgagacattttccagccgcctgcggcacatcagcgtctacgcccgcgtgcagcccgagcacaagactcacatcgtccgggcctggcggaatgccggctttgtcaccgccatgaccggcgacggcgtcaacgacgcgccgagcatccgcgcggcggacatcggcatcggcatgggcattaccggcacggacgtgacgaaaaacgtggccgacatggtgctcgccgacgataattttgccaccatcgtcggcgcggtcgaagagggccgccgcatttacgacaacatccagcgtgcgatcaagttcctgctcggctcgaacatgagcgaggtgctgagcattttcaccgcgacgatgctcggcttcacgatccttgagccggtgcacctgctgtggatcaatctcctgaccgactgcttcccggcgctcgcgctcggcatggagcgcgcggagccgaacgtcatgtcccgcccgccgcgaagcgcgcgagagagtattttcgcccacggtgtcggcttcgactgcgtatatcagggcgtgatgtgcgcggtgctgacgctggcggcgttcttcattggtcactacatggagtacggcgtctggacgctcacgaactcgcccgacggcacgaccatggcgtttctgaccctgagcatggcggaaattttccacagcttcaatatgcgcgcacaccgggcgagcatcttcacgctccgcacacccaactggacgctcgtcggcgcggccgcggcgagtcttgcgctcacgacgctgtgcatctatgtgccgtttctggccgatgcgtttgatttcacggccatctccgccgccgagtacgccgtggccatggggctcgcggttttggtcatcccggtcgtggagcttgtcaagtgtgtgcagcgcgcggtggaaaagcgcgcggggcgcgcatgatttctgccgcgccggcgcacactaaccccgatttcaacgagaggagatgggtgctgtgcgccaggcgctgccgattccccagcgcgtgatggcagtggtgctgtccgtactgttcgtgttctgcccgttcgcggcccatgccgccggggagagcgaccctgcggccaatcccgtgctgctgccgatcatcatgtatcacgaagtgaagcccaacaaatccggcaaggatgccatccagccgtgggagttcgaggcagacctgaaatggctggccgacaacggctacacgacgatcgtcatggccgacctcatcgcctatgtccgcgacggcacgccgctgccggaaaagcccatcatcctcagcttcgacgacggatactataataattacgtctatgtcctgccgctgctgcagcagtattcggcgcgcatcgtcctctcgctcctcgggcgcaacacggacgatttcaccgagtggccaagtgagagcatcgactacgcgcacgtcacgtgggatcagctcaacgaaatgctcgacaccggcctcgttgaggtgcagaaccactcgtatgacttgcacgcttacacatccgagcggcacggctgcatgcagaatccgggtgagtcggacgcggcctatacgcagctgctgcgcgcggacttgcagcgcctgcaggatgagctcgccgagcacaccggccgcacgccggacacgtttgcctacccctacggcaagtacggcgacctgacggacaccgttctgcgcgacatgggctttcaggcgacgctgacgtgtgactggggcgtgaaccacatcacgcgcgacccggactgcctctaccggctcggacgcatctgccggtcgcacaatcagtcgctgcagtccgtgctccggcgcgcgatgaaggcgacggcgtgagcggatgaaaacagaagacagaaagggcacgcatcttgcggatgcgtgctttttcgtgctttgcacgcaccatgcgccttgggcatacactgaggagaaagcgatttggcgcaagcaaagggggagacgccatgaaaatcgagctgcgccgggccgccatgacctatcaggcgccggacggggaagtggcggcgctgcgggatgtgaccttcggcgtggccgacggggagttcgtgagcatcgtcgggccgtccggctgcggaaaatccacgctgctggcgctcatcgccggcatcgagcatccgtcgggcggggaggtgctcgtcgacggcgagcctgtgcgcgccccgacgggcaaggcagggctcatgccccagcgcgaccagctctttgactggcgcacgatctggggcaacgtgacactcgggctggaggtccggcacgagaacacgccggagcaccgcggcggcgtgcacgatctgctcgagcagtatcagctcgcgggttttgcgcgcaagctgcccaatcagctctccggcggcatgcgccagcgctgtgcgctcatccgcacgctggccacatcgccggatgtgctgctgctcgacgagccgttttccgcgctggattatcagacgcggctggccgtctcgggcgacatttcgcagatcatccgccgcgagcataagacggccctgctcgtcacgcacgatatttccgaggccatcagcctctcggaccgcatcgtcgtcctgtcgcaccggcccgcgaccgtcaatgccatccacgacctcggcgcgctgcgcactgtgccgccgctcgagcggcgcagccggccggagtttcagacgctgttcaatcaaatatgggaggagctggatgtcaatgtctgaacgatcgccctccccgcagcgcgcggcctatctgcgcgcgcagcgccgccgtcgtcggctcgtgctggcgctgcagatcctgctgctggtcgtgtttctcggctggtgggagctctcggcccggctcggctgggtggatgccttcatcgtcagcagcccgtcgcgcgtggtgcacacgctcgtgggcctgcaggcttccggggagctgtggctgcacatcggcacgtcgtgcctcgaggtcgtggtcggcttcgtgctcgggacgctgctcggcacgctcatcgccatcggcttgtggtggagcgagctgctctcgcgcgtgctcgacccgtatctggtcgtgctcaacgcgctgccgaaaacggcgctcggcccggtgttcatcgtctggatcggcgcgggcacagagtcgatcatcgccatgacgatcgcgatctcgatctttgtcacgatcctgaatatgcatgtcggcttcctgtccacggaccgggagaagatccgcctgatgcagacgctcggcgcgacccggcatcagatcctgtggcggctggtcatcccggccaactacgccacgctcttcaatacgctgcgcgtgaacgtcggcctgtcgtgggtcggcgtcatcatgggcgaatttctggtctccaaagccggtctcggctatctgatcgtctacgggtcgcaggtgttcaacatggacctcgtgatggcgaccgtcctcgtgcttgcggtggcggccgtcgtgatgtatcagctggtgctgtggctggagaaatttttcaaaaatcggttgggagtgacgcaatgaaacggtttctttgtggggttctggcggcgctgatgctggtggtcttgtgcgcctgcggcaagcaggagacggccaccgtccgcctgagtgaagtgacacattcagtgttctacgcgccgcagtatgtggcgctggagcagggctttttcgccgatgaggggctcaatatcgagctgaccaacggcggcggcgccgacaaggtcatgacggcggtgctcaccgggcaggcagacatcgggctcgccgggccggaggcgtgcatctatgtgtacaatcagggcaaggacgattacccggtcgtgttcggccagctcacgaagcgcgacgggtcgttcctcgtcgggcgcgcggatgtgcccttcagctgggagctgctgcgcggcaagactgttatcggcggccgcgcgggcggcgtgccggagatgacgctcgaatacgtcatgcggcaaaacggcgttgtccccggcacggatgccgctgtggacacgaccgtgcagttcaacatgatggccggggctttcaccggcggcaacggcgactttgtcacgctcttcgagccgacggccaccgaggtcgcgcaggcgggcaagggctacatccttgcgtccatcggccaggagagcggcgagatcccgtacacggcctacttcgcctcgcaggcgtatatcagtgaccatgcggacatcgtgcagcgttttacgaatgccatcgcccgcgcgcagaaatggatcgcggagcacgacgcggcgcagaccgccgagatcatcgccccgcagttcccggacatgagcgtgcctgtgctcacgcaggtcgtgcagcgctacaaggacatcgacgcctggaacgccacgccggtcatgacgcgctcgtccctcgagcggctcgagaccgtcatggagacggccggcgtgctcgatcacgccgactgggtggattttgaccgccttgtcgacaacagctatgcgcacaacgcctcctgattttctcgcctgcgggcggcaaactctgcgaggctttgctgacacgcaaaatcccccggcagcagccgggggattcgtgcgtttttcaaaagagggggggtgcttagaagctcgcaacgacagcgccgttgtaggtgtcggcgatgtactgcttcacggcgtcggtcttgagggctttgagcagggcctgggtcttcgggctgttctcgtcgccggcgcgcacggcaatgatgttggcgtaggtctgggcggcagcgccgttggcgtcctcggaggcgagcgcgtcgctgatcttcaggccggcggccagggcgtagttgccgttgatgacggcgatggagccggcagcggcgttcttgagctgcgccgggacggtgtctgcctgcacggtgacgatgttgtagccgccgtcgtcaacgatgtcgagcgtgctcacgcccttggcggcgtccgcgtcatcggggagcttgatcaggccctcctgctggagcaggaacagggcgcgggtctcgttgctgtcgtcggcggggatgatgatggtcgcgcccttggcgagatccttcaggtcggtgacgccgttgccgtagatgccgaacggctcatagtggatggtgccgacggagacgaggttggtaccattcttggcgttgaagctgtcgaggtagggcttgtgctggaagtagttggcgtcgagcgtgccgtcggccagagcctggttcggcaggacgtagtcgtcataggtgacgatcttgagctcgtagccttcgtcggcgagggcctgcttgatctgctcgaggatctcggcgtgcggggtggcgctggcgccgacggtgatgactttgtcatcggaagcggcagccttcttgtcatcagtggtcttgtcgccgcaggcgctcagcgcgacgagcgagaacgtcagcacgagggcgaggatgagggacgtgatctttttcattttcgtttctcctttatattttcattttgaaatttgtgtggtttcggatgttaggatgtgcagttcggggcggcacattcgtccgcgccggatgttcacgcgcagcagcgcgggatagtgtaaacgcatgggctgtctcctgtcaggtgcgggagcgccggtcggtgcggcgggcgatgtacatgccgaactcctgcaggatctgcacgatgatgatcgtcagcgctacgcacagccagacgatctgatcgtcgtacttctggtagccgtaggtgatggcaatctggccgaggccgccgccgccgatcgtgccggccatggcggagtagccgaggatggtcacggtggagatgacggcgccggtgatgagcgcgggcttggcctccgggatgatgaccttccagatgatgcgcagcgtggacgcgcccatggacagcgcggcctcgatgacgccggcgtccacttccttggcggcggactcgaccatgcgcgccacatacggggcggcggcgatgacgagcgtcacgatcacggcgcggttgccgaggctggtgccgacgatggcctttgccaccggcagcatggcgaccatgaggatgatgaacgggatgctgcgcagggcgttgacgatgatgccgagcgtgcggttgagccagccgatggggtggatgccgtcgcggtcggtcatgcgcaggatgaggccgaccggcaggccgatgagataggcaaagaacgtggagatgagcgtcatgtaaatggtctcccagataccgagctgcaagatgccgttttgccagagcttgatgagcagatcagacatgacttccatcctcctgtagataagagatgtggttatggtcgagccagcgcagcacatcgtggaactgctgcgggtcgtcgggcaggtcgatgaccatgtggccgtagatgctgccctcgacgatgcgggtgtcggcgaagagaatgttcaccggcacgtggcactcgagcgtgatgcgcgagatgaccggttcgttggagcagctgccgtcgaagacgaggcgcaggcgcctgcccgtgcacggcgggaggttttcggccgggctcttcgggagaatgagcgccttggcgatgtcggacttcgggtgcgtgaacacgtcgctgacgttgccgatctcggcgatgcagctttggtcgatgacggccacgcgctggcagatctgctcgatgacgcgcatctcgtgcgtgatgacgacgatcgtcacgccgagcgtctggttgatctccttgagcaggtggagaatcgactgcgtggtgttcgggtcgagggcgctggtggcctcgtcgcacaggaggtatttcggccgcgtggcgagggcgcgggcgatggccacgcgctgcttctggccgccggaaagctgcgagggatagtttttcgcgcggtcggacaatccgacgagttcgagcagctcggcggcgcgggcctgagcctcgtcgcgcttgacgccggcgatctcgagcgggaagcagatgttgcgcagcaccgtgcgctgctcgagcaggttgaagctctggaagatcatgccgatgtcctgccgggccttgagcaggtcgcggcggctgagctgcgtcatgtcgcgcccgtcgatgcgcaccgtgccggaggtcggccgctcgaggaggttgatacagcgcacgagcgtgctcttgccggcgccgctcaggccgatgatgccgaagatctccccgtcctcgatgcggaggttgacgtcccgcagtgcgtggatgtcgccgcccggtgaggggtaagttttgttgagatgttcgatttcgatcatggtggattctccctcgcagaataatttttcggtacaaaaaacagaggccggaagactcgttgtcttccggcctctgcggatacggcttggaattctggatcagccgttattggaagcgaacacaagacgagtcatatttctgagcacgacgagacatgcacatgcagccgggcatgtacatcatcatagccatcatcatgttgttcgtctgagcaaacttcataatacgacgcgtctcctttcgttaaaaatcacggtttccggtggaaacgagcgcagtataacgcagttttctgcgcttgtcaaccccaaaatccacaaaagcagtatgaaatatgcattagaaaaagcaaatccatcgattctaaaatttgatcgtttgcggcgttacgtccgggtcgtggctgcacagagacgccgcgcaggcgccgtcccggctcatctcgccgatccagtcgagcgcctttttcgcgcgcacgctgttttcacagatgccgggcacggtgccctccgcccaggagcggggacttgccgcgccgtcggcgttgagcagcacgtaccggccgccattgcggatgagcgtggcgaacatgccctccgtgtgcccggcgatgtgcacgagatgcaccgagtcgtccccgaacaggtcgtacgagcggctctccggcccgatgtggttcacgcggtaccagaaccgctccggcggctcgtccatccacagcttgcgcgaggtgtagcgcaggttcacgcggcacgaccagaagtattcctcctccgccaccagcagacgctttgcgccccgcacctcgctgatgcccgcgacatgatccgggtcgaggtgggaaaagagcacatagtccagatcctgcggccggatgccgcgcgcggccagttgctcgccgatcgactgccccggcttcacgacgctgtgcacgagcgtgtaccacccgcggccgaacatccgcaactgcgccgcgcggtcctcgatgccggtcgggctcacggtgcgcggcagaccggcgtccaccagaaacaggcccttcgggtgctccaccagatacgccgacaccggcagccagatgcgcgcgccgctcttgagccgccgcgcgtccgcttttgccggccagcgccactgggcgctcgccggcaggttcggcgccacgccgatctttccgcagtgcagaacatggatccggatctgagccatggccgttccctcctcgtgaatgtacgcgatattgaccaaatggttactaaaaagcatatcaccgcctgtgcagaatgtcaagacaggcggggaaaacgaccgggattttgcaatcttcaacaatgtgctgtgcatttgcgtattgaattgtatgcgtgagatgtgctacaatagattgcgcatctattcacaaaccagggaatgaaaacaaaacattttaaggggaagaaaggagcctgaaacatggcaagagaactgatcctgaagctgggcaaaaagatcacggaccgcgtggacgtgaagctcggcatgaccaagctcgacgagaattcgcccgagtattacggcctggccagcgtcgtcaccgacgagatggcggagcttgcgctcgcgatgaaggtccgtgtcccgaccacaccggccgaaatcggcaagaaggtaggcaaggatcctgtctacgtggagcagctgtttgaccagatgtccatgatcggcctgctcgagtacaactgggagaacgccgaccatcacaaacagtggacgctgccgatcttcgtgcccggttctgcggagctgatgaacatgaacctccagcaggtggagacgcacccggagatcgcacagtttttcgagcgcatgtcgtttctgccgctgacgaagatcacctgcatggtgcctcccggaggcgccggcgtcggcatgcacgtcatcccggtcgagaaggccatcccggccacgaacgagtcggtcgatgtcgagcacatctcccactggctgaaaaagtacgaggatcagctcggcgtcggctactgctcctgccgcaatgccatgcgcattcagggcgagggctgcggcgagctgcaggatgagatgtgcatcgccgtcggtcagttttgtgactactgtctcgagaccggcaagggccgcaagatcacctatgatgaggcgatggagatcctccagcgcgccgaggacaacggctatgtccaccagattacgaacatcgacggcgaggataagatctttgccatctgcaactgtgcgctcggctcctgcttcgcgctgagaacgagccagctgttcaacacgccgaacatgtccgcctccgcttaccgcgcccatgtcgacgccgaaaagtgcgtcgcctgcggcaagtgcgccgaggtctgcccggccggcgccgccaagctcggccagaagctgtgcaccaagaccggcccggtgacgtatccgaagcagcccctgccggacgacaaccactggggcgagcacatgtggagccctaactataaggacgacaaccagaagcagtgccacgagtccggcactgccccgtgcaagaccgcctgcccggcgcacatcgccgtgcagggctacatcaatctggccgcgcagggccgctatctggacgcgctcaagctcatcaagcaggataacccgttcccggccgtctgcggcagcatttgcaaccgccgctgcgaggaagcctgcacccgcggcgatgtcgaccgcgccgtcgccatcgacgagatcaagaagtttgtcgccgagcaggagctccaggccgacaagcgctatatcccgaaggtcatcacccaccgcggcatcgccgatccctacccggagaagatcgccatcatcggcgccggcccggccggcctgtcgtgcgcctactatctggcgaacatgggctatgaaaacgtcaccgtgtttgataaaaacgaagtgcccggcggcatgctgaccctcggcatcccgagcttccgcctcgagaaggatgttgtcaacgccgagatcgaggtgctccgtgagatgggcgtgcacttccagtgcggcgtcgagatcggcaaggatctcaccatcgaccagctgcgtgagcagggctacaagggcttctatctggccatcggcgcgcagaagagcgcacccatcggcgtgcccggcgaagagctctccggcgtgtacggcggtgtggacttcctgcgcagggtcaacctcggcaagaagccgcgcatcggcaaaaagtgcgccgtcatcggcggcggcaacgtcgccatggacgtctgccgcacggccatccgcctcggcgcgaaggatacttacatcatctaccgccgcagtcaggcggagatgccggcggacgcagaggaagtcgcggaagccatggaagagggcgtgcagttccgcttcctgagcgcaccggccgagatcctcggcgaaaacggcaaggtcaaggccctcaaggtcgagctcatggagctgggcgagcccgacgcgaagggccgccgcaagcctgttggcaccggcaagttcgagaccatcgaggtcacgtccgtcatcggcgctatcggccagcgcgttgacctcggccatatcgcgccggaggccatggccttcaaccgcaacggcaccgtccaggccgacggcgtgacgtatcagaccgcgcagcccgacatcttcgccggcggcgacgtggtcaccggcccgaagtttgccatcgacgcgatcgcggccggccgcgagggcgctatctccctgcaccgctacgtgcatgagggccagagcctgacgctggcgcgtgacccgcgtgaattctacgagctcgacaagaagcaggccgttgtgcccatcgactgctttgacgccccggcgcgccagaccgtcgcccacgacgcgagcaaggccaagacgttctcgaacgaccgcatcaccttcaccgaggcgcaggtcaaggcagaggcgtcccgctgcctcggctgcggcgtgtccgtcgtcgaccagaacaagtgcatcggctgcggcctgtgcaccacccgctgcgagtttgatgcgatccacctgcagcgcgatatgccggaggccagccgtatgtaccgcaccgaggacaagatgaaggccatcctgccgcacatggtcaagcgcgcagccaagctcaccatcaaggacatcaagggcaagcgcgcgaagtaagccgaccggaggaaaacgcgatgcacgaactgggaaccgtgttctatgtcatccaggaggtcgaaaaggtcgtcgaggaaaaccacctgacccaggtcgccagcgtcacgctggaggtcggcgaggtcagcggcatcatcccgtattacctgaccgactgctggaagtgggcggtggaaaaatcgcagtatctcaagggcgcggagctgaagatcgagacgctccccgccgtgacctactgcgaggactgcaaacagacatatccaacggtcaaatacgccaagatatgcccgcactgcaagagcgagcatacctatctgctcagcggcaacgagtacaccatcaaggagatcgaagcctgctagcagccgcaaaaagagcaaacggggaacgcttttcggcgttccccgtgtatttatatctcgtctgccggcgcgctgtcgatcgggatctggatgatctccagccggcggcgggcggcgtattcgagcgtgcgggccgtgccgccgggccggccgtcaaacgccgcgatgaggatgcgcgaggcatcgaccatgtagcggttgcggcgcatcatgcacccgggggtgtaggcctcctgcacgagcgtctgatagtcgcactggcgcaggtcgtaggcgtagcgttcgcgcagctccggccgccagcggtcggcctggccggcgtaggggatggccgcctcgatcgtgacctccgggtgctgcaggcgcagatagcgcgcagcgtcgaaaaaatacaggtcgcagccgttggccatgccgcagatgaagtggcggatgccggcggcgtagacggcgtccacggcgtcgaagagctgctgctgcagcttgcggcagcgggggtcgttctcgtcgctgccccagggcagcttgtattcccggtggccggtgaagcagcaggtgttttcgcgctcgggcatggcggcgcctcctttcggtggtggcctccattgtacgcgcccggagcgctgctgtcaaacctttcctgcaaaaaagtacttgcattcttttcccactgtgctataatgcagacagtaaaacaactgaatcgagatgtcttcggggcagggtgtaattcccgaccggcggtgatagtccgcgagccgagcaaggttgaatcggtgcaattccgataccgacagtatagtctggatgatagaagatgttacgaacctccattgttcgcagcgcctgaaggacatgttctttcaggtgtttttcattccatggaggtgttttgtcatgttgaaagaaaacctgtcctttgttggtatctgcgtgcttgtgttcgcggcattgctcggccttgcgtatctgtttgagcgcacggtctgccgtgatctgcagcgccgcagccgcagccgcaacatcagctatgtggccatgttctccgccctcggcggcgtgctgatgctgctcgagatcccgctgttttttgcgcccggcttctataagatggacctgagcgagctgccggtgctcatgagcgcgttttacctcggccccgtggccggtgttatcaccgagctgctcaaggtgctgctcaagctcctgctcaagggcacgagcacagcttttgtcggcgactttgccaacttcgtcgtcggctgcacgttcgtccttcccgccgctgtcatctaccaccaccacaagacccgccgcaccgccatcatcggcatggccgtcggcacgctgtgcatgacggtcttcggcagcctcttcaatgccctgtacctgatcccgaagttcgccgagctgttccacctgccgatcgatcagatcgtcgccatgggcacggctgtgaacaagggcatcaccagtgtgccgacgctcgtgctgttcgccgtcgtcccgttcaacctcatcaagggcgttgtggactcggcgctgacgtatctgctgtataagcgcgtggagtttttgctcttcccggagctgcgcaagaaggagaaagtccagccgcaggtccagtcgaagaatcccaccccgcagcactgagatcgtacataaagaaccgcctgcaggcatcagcctgcgggcggtttttcatctgtgcagatgcggcgcaccgtgcgcagcagcaaggtgaagctgagcgtgaagttcacgcactcgttgaaatacaaaatgaagatgtaccccgccagcccgaaccgcggcagcagcacccacacgagcactacgccgagcgtggcgtcgagcacattgatggccatgcagcgtgtctgctggccgagcccgcgcaggcagccgtcggtcacggtgtcgagatacatcaccggcacgagcggcgccagcagccggatgtaccgtcccgcgtcgtccgagtggtagatcaactgcccgagcggcccggaaaacgccagcagcagcacggccgtaccgcacgcgaacagcaggcaccggtacagcagtgcgcgtaccagccgccggatgtccccgcaccggccggagacctgcgccgtcgtcagctccggcacgagcagatccgccagcgcgtacagcaggcacgaggggaagagcaccaccggcagcgccatgccgtgcacgatgccgtagcccgcgagcgcgcggtcggccgtcaggccggagcttttgagcccgcgcgggatgagcaggtgctccagcgtcgtgagcgatgtgcgcgcataggccgacaccgccagcggcagcgccacggagagcatccgccgcgtcaggtgcggcacggtgtcaccgcccgtgcggtatttgcgccggtcgaggagatacactgccgccatcatcagcagcgacaccacgtccgcgcacgcaccgcccgccgtgacggcggcgcagctctgctccaggtcgccggcggccgcaaaggacaaaaaccacatcacgcacgtgatgctcaccaactgctcgatcaggtgcacgagcgtcggcttccacacgcggccggaggcggtgaaatacccgtccatgaccgacgagagcgcgatgcacggtaggctgatgctcgtgatgcgcagcgagcgcaccgtgcgcgcgtcgccgatccagagaaagcccacgggctcggccagaaaatacaccatcgtacccgcgcacaggccgaaaaacagcgcgtagcacgcgcaccggcgcatcgcgcccgtgacgcccgcgccgcgctcgagccccatctcctcagagatcaggcgtgtggtagcaaagcggatgcctgagatggcgaaggttgcaaacagcacgctcaccgacatgacgagctggtacagcccgatgccggccgcgccgatgcgcccgacgatccatgcctgaaagacgagcccgatgcagcgcatcacgatcgacgagccggtcatgagcgcggtgttgacgatgagcctgcgatttgtgtgcacgcgcgcgacctcccgacgcagtttgtaccactctatggcgcgggagggaaaaacatgccgcctgcaaacctatgcacaaggacaaaatcatggagcagcgggggagcccgagggggcaaggcccgtctcggataaaatccagcgcttgtctcaaagcccgagcaggactttgggacaaaacgcatgccgcccggcgttcgccgggcggcatgcgttttgtgctcattcaggtgtgcagatcggtcttgatcttcgtcgtggagatctcgggcgtgcgggggaggtagacgacctcgcatttgtccttcaggaagtcgaacttgcccttccagtcgtcgcccatgacgaacacatccacgtggtatttgtccacgtcggtgatcttctgatcccagctctcctccgggatgacgagatcgacatagcggatcgcctcgagcatccgcttgcggtcctcataggagaagtagctctttttttgcttttcgttccagttgaattcgtccgtgctcagggccacgatcaggtaatcgccctgctccctggcgcggcgcaggaggttgatgtgcccgtagtgcagcaggtcaaaggtgccgtaagtgatgacacgtctcatgtgtgctccctttcccggaggcgctcggccagaaacgcggcgacgcgctcggcggagtgtccgtctgtgtattggttggtcagcttcgtgagctgcatgcgtttggcccgcagcggatcgtcgcccgcggcaagctgctcaaaaaacacgcggaaatcgtccggcgtgtcgagcatggccgcgctttcgcgcagcggctgcgggtcgatggcaaagcccggctgcttggcgtaggcgtcgatatcctcgaacgtcagccccacgggcttgcccgtgagcagatagtcaaacagcacggaggaatagtccgtgatgagggcatccgtgcaggcgagaaattcgtaggacgtgatgccgtgcgcggcgaagagcccgtcgtcgatgaagcggaggtggctcagctccagcgcgcggatgtgcgacaggtcctgcgccgggtggggcttgacgatcacgagcgtgttcgtcgcccgcgcggcctcgttcacggccgcggccgccgccgggtcatggatgacggggacggagatgtccgtcgtcgcaacgaggttgttcttgtgctgccggtacgtgggataccagacgacgaagcggtcaaactccgcgccgaagatgtccttcaggtcgcatttgtgcgtgaacaggtcgtcgttgcgcgggaagccgagcgtgacgagcttttccggtgggatgtgaaattcatagctgttcacggcgtcaaaaaacggggcctgactcagcgcccagtcggtcgtcgggtcgcagaaatagtagtcgtgcacgctcttgagcgggctgccgtgcgtcaggtacagatgcacagtctccggtcggagcttctggagctggccgttgcagtccacgatggcagcggcgcgggcgcgcagccagaacagccgcagcagcgcccatgttccccgcgtgccggcaaaggacacgttcttttcatgtacgttccgaaaagcggccggatccggcacgacccacacgagccggtatcggtcgttccagccctgggccagcagcgtccggtacagggcgccggtgttgtcaccgaggggcggcgcgctctcgagcaggatgaccggcttgccgggcagcaggctcagcagccgcacgagcaggcgtttcaagcgttgtttcattttctcagcacctttcgcaccatgccgccgacgagggccttttcatatccgttcatggacagcagccacacggaggcacagtagatcgctgtgtagacgatgatgccgccgagcagcatcggaatactgtagaggtttacaaacagcatcatcagcacgccgcacgcggcgggcggcagcaggccgagcgtcatgcgcccgatatttttccagaacacggtcacgtcgatgttcagccgccgctgatagaagatgttcatcacgagtccgtttgccagcgcgacggcgacggccgtgccgatcgcgcagccgatcgcgccgaggtactggcacagccagatgctgatggcgaggttgccgatggccatcgccccgtagatgatcgagcggtacttgtgcagattctgcgcgcgctgcatctcgatgccgaggttttgcgtcagcggcaccatgccggggatgatgagcagcagcacgatgatatacgcatcgtcatagcccggtccggcccagaaatagataaacggcttgccaaagaagatgatgcccgtgcacacgagcgacaggattagaaactggatgcgccccacgcgcacgaacagctccgtgagcacggtgcgcaggcgcgctttgtcgtccttgttgtcctgcacgagctgatggatgcgcggcgtgaacacggacgacaccgccgtcgaaaacgagatgaagtacgtgtgcagctgctggccgacggcgtagaccgccgtggcggccgtgccgcagtagcgcgtgatgatgagcttgtcgaggttgttgttgacctggtcgacgaccatgttgatggcgatgaagccagagaacacagcaatgtccttgagcacggcgccgtcaaagttccggaacgagacccaaatgtgcagcttgccgaagcagtagatcagccgcagcacgtccacgaataccgagatcgtcaccgtgacgacgaccatgccgatcgagccgtagcccgccagcagcaccggcagcgtcacgagcggggacacgaccgtgcgcaggatctccgtcgccttcaggaacacgaactgctcctgcgcgctgatgatgttgctgaacacgctcatcgggaagctcacggcgaggttcgccgtcagcagcagcatgaggatgcgcgccgtgtggtactcggcgtccgtcaggccggtcttgaacaccatctccagatggaacgtcaggtacaggccgcacgcgagcgcaacgagcccgatgacggaaaacacgatcaggaacaggccgttgagccgcgcaatcttatcgtccgccttttccttgcggtagaggatgtaatagcgcacgtagctgccgccgaagccgagactgagcaccgacaaaatggcgatcgtcgaggcgacggtggagtacaggccgtactcgctcttgccgaggatgcgcagcatgaacggcgtgtaggcgaccgagacgatgatgttgagcgtcatctgcacatacgtgagcagagagccggaacgcagttgattgtgatgcttcatagtgtcagtgtccggcggcggcgaacagcaggtgcaccgcccggtactgcttcttcccgagcagggacagcaccagcttcttgcgcgccggatagcctttcagataggggttgtgccggtagtcggggaagcgcgcggcggtaaagtccagcagctgcggcagcagtgggtgcgcgctctgcgccttgagaatgcgcacggacgcatcgtagagcacattgtccacgcagagcttaccgagctcgttttcatactgctcgaacaggccgcgcgcctgataccacgtcagcacgtcgtcgatcgcgtccatgatttcggcgttggcgtcgagcgcgcgcttggtcacggagccctcgtgctgccggtagaggtagagcacgtccggcaggatcacaacggatcttgccgccgtgagcatcttgcgcgtcatgcacagatcctcgccccagccgcgggcgcgaaagcggatgcccgtgtccgtgaacagggtgcgccgccaggccgcgatgcaggccgacgggcggttgagcagcagggcaggcgtctcctgaagtgtcagcggcgtatgcagcggcaggtcgtcggtgaacaccgcgccgtcgttgtcgccggtcatgcgcagaccgaaatagcacacgtcggcctgcgtctcgtccagtgcggcggccagcacggtgaacgcctccggcgtatagctgtcgtcactgtcgagaaagagcacatagtcgccctgcgcgagcgggagcgccgcgttgcgcgcgtcgcctgcgccgccgttgggcttgtgcagcacgcggatgcagtccggatgttcgcgcgcgagcgtgtcgcacagcgcgccactctcgccgtcggttgagccgtcgtccacgagcagaacctcaaagtccgcgccggtctgtcccagcacggagtctacgccctcgcgcaggtattcccagccattatagaccgggatgatgacactgaatttcatagcttcctccagtccgggcgctcagccgagcttgtccttgacggcaaaaagtgcccgcacggtgcggtatttgcgctgccgcagcaggcgcaggatcagcttgtggctgcgggagagctgcgcaagcaggggattgtcgagatagtccgggaactgcgtctgcacatagtcctgaaagcggtcgagcagttcgctctccgggtccacgcgcagcacgcgcaccgaggccgcgagcagcacgtgatctaccgccaggcgcgacagctcgttgtagtagcgctcgaacaggccgttttcgcggtaccagtcgagcaggttgtcaaaggctgtgaacagctcggcgttgcgcgccgtgttcgtgttgcgcgtgatggagttggtgcggtcaacgtagtaatacaggatgtccggcacgaaggcggcgcttttggccaatgccagcagcttcacggatgtgcacagatcctcgtaccagatgcgcgccgggtagcgcacgccggaatccagaaacaggctgcgccgccagatgcggctccagggggagggcatggtctgcatcagctcgggcgtgtcggcgagcgtgaaggtgcggtcggtcggcaggtgatccacgagctccttgaccacgacgccgtctgcctcgagcgccgcgccgaagccgatgatgtcgctgccgaagcgggcgacggcgtcggcaagaacgcggaacatgtcgggggcgatgtagtcgtcactgtcgatgaagatcaggtactcgccctgcgccgcctcgatgccgacgttgcgcgcctcacccacgccgccgttcggcttgtggatggcgcggatgcgctccgggtgcgccgcagcatagcggtcgcagatcgcgccgctctcgccgtcggtcgagccgtcgtcgatgaggatgacctcgtagtcttcaaaatcctgcgccagcacggagtcgatgcacttgggcaggtagtccttgacgttgtagaccgggatgacaacactgaaaatcatgcgcgtttctcctctccgtccggcagggcgtccggctgttcactgcgcatctgcgtcaggtaatagaccacggccagcagcaccgacatgtagatcgaggcgttcggtcgccgcagtacgccggcagtgaagtaggcgtacaccagacacaggcacagcccgatgccgaaggcaccggcctccaccgtgaagtatttgcggaaatctttgatcaggcacttgacgatcaggtacaggaaatagccgatgaaggcgaccatcatggccagacctacccagccgtagaggaagcagatgccgtgaaaatcgttctccacgtcataaatctcgccgtcaaaggccatgcggccgagctccatgccgaacaggcgagaggtgaacggctgctcgtcgagcagcatctcgcagaagacgatcttgcggtggcgggtcgccgtgatgtccgtgacctgatcggaatagccgtaggcggacatgacgcgcgccgtgccgaagcgctggcacatattcggggagtagaaattatagatcgtgcacagggcgtggtagcgctcttcgggcgtgacggtggaagtgccggttttgttgccctcggcgcgcttgatcatgcgctcggcgtcgttctgcttgtagctcatggcctcgttgtagcggttctggttgatatacatgggcgactgcttgtaggtcgcacagcatgcgatgaggatgagcaccagcacggcaatgtagcgcttggaggtgcgggccttgccagtcagcaccagcacgaccggcacgcccagcgcggccacggcgatcgagaagaatgccagacgcgtgcccatgagatagagctgcgccagcgcggcgacgctcgtgaccgtgaacagcaggaagttctttctgcggtagcacagcaggatgacgatgggcgcgagaatgctcatgatcgcgctctgtgcattgccgaacgagtaccagccgagaatgccaacgttggtggactgataggtcgccgaggaggtgtgtgtgagcacgctcacgacgaccgaggccgtgatgatccagaagttgagcatcaggccggtctcaaacgcgcggtagcacttgttgttcgcccgcagaaacgagatgaagcacagcacgaacagcggcatctgcacgacgcgcacaaagttggtcaggtcgtagacgatgcgctggtagccgacgatgaagcaggagatgcagtgtccgacgagcaggaaggcacaggcggcgatggcgatgccgtagacctttttgcgcgacgaggtcacaaacccgagcacgcacacaacggcgaatacggcgaagcgcagcagcaatgtgatcgtgttgctcataccgagccggtccgtccagaaggataggatgtccatcagcggctgcaggatcagaaggatcatcagaaacttcggcagcatcggcgcgagccgctcgcgcagggagtgtttttcttcggacatatcagttctcctttgagtcgtcgtaatctctgatatagatcaggtaccagatggatgccagaatcaggcagagataaaaagatgcatttgggcggcgcagtacgccggcggtgttataaatgtgggcgagggcggtgcacagcgcaacgccgcaggcgccggcctcgaccgtgaagtaacgcctggcattgcggatgagcgcgcacacgatgatgaccaggaaataccccagaaaagccaacaggcacgcaagccccgcccagccgtacagatacgcgatgccgtggaagtcattttccacgtcatagcagtacccatggtaggtcatctcgtcgtagctcaggccgaacaggcggctggtaagcggctcggtgttcagcatcaggcggcagtagttgatcttgatcgtgcggacattcgtgatgtcggcagctttggtggagtatccgtacatttccgccgtggcctcgagtccgtagcgctcgacagtcccgccgaggtactcatcataggcataggtgaggtaggcatacccctgatcgccgaattccgccttgccctgcgcgaccagccggtcgatgttctcctgcttgcgcacggcgttggccgcaacggcctgctggttgcggtgtatgggggacacggtgtagcccgccgcacagacggcggcacacagcagcagcacggcgcagacctttgcgctgccgcgctttgtgagcgcaagcgtgatgaccatgccgatcgccgtcacgaacagggacatataggccagacgtgtcgcaaagcagaatagttccgcgaagccgacgacggcgatgggcagccagcgccggatctgcccgctgcgcagtgccggacacagcgcgagcggcacgagcatcgacaaaatcgcgctctggctgttggcaaagtaaaaccacccgcacaggccgatgcgcttgtccggatacgtataaggatccgtgccggtcagggcgctgagcagctcgacggcggcgatgatccagaaggcgatggtgatgccgcgctccaggctggcaaagccttgccggcagcagcgcaggaatgtgataaaagcgatcgtaaacagcggcagctgcgcgaagcggatgaagttggtcgcgtcggagatcaggttcgcggtcgtgaatggagcgttggcgcgcaggcacgccagcacgtgccccgcatagagtgcggcgcacacggcagcggcgatccagtaaaagcgccggcgttccgagagcacgaagcccgtgagcatgacgccgagaaagatcagcaggcgcagcgacagcgtcagcttgctgccccaggccagatcctgcgtccagaatgacagcacatccagcagcggctgcgcggcacacaggctgatgagcacaccgggcagccagcgcggacgggccgcttcctgcgacgatatcggttgcatagtttttcctctttttctctcaggatagttacactccatcatacgcttttttcccggtcaggtcaacctgcgcggccgtttgttcatatatttttagagaatatagtatgcagacacccccggacggagataaactccggtcgggggtgtctgtcgtgtcggatcacagcagcttgtccgcctcgtgtgcatagctgcagatgagcttgtcgagcaggcgctgcaggtcggcggccttcgggtctgtgaccgcctgtgcatgcaggcggtgcaggccgtcgatggcctcctggctcaggccgagggagctgtagacgtcgctctcgccggcgcgctgcgcatcggcgtcgtcggccgcctcgtcaaagccgagcaggaagttcggcgtcgtgcggaaataccgcgcgatgcggctcacgaccagtgccgacggcaccgtgacctcgcgccggtcgttcggcttgagatacttgcgcacggccgggcggctgatgttgatctcatcggccagctcctgcgtgttgacgggcttgccgtacacgttgttgccattcatcagataggtcagccggtcacggaacacgctgccgaaaccgccggcggcctcgtcgttgtctttgcccatgaaaatgacctcccattccgtaaagtaaattttttcaaacttttttcggaaaaaggcttgacaaacccgtagaaatggtttataccaaagttacgttaatcaaaaacgaaactttggtttctcgctacaggccgaatcaagcttttctgcccctcagtaaagcacaaccggccgcaaaagtcaagacatactcccccaaaacgacaaggaggtatcgctatgagcaaagatcgtgatctcatttttgatatgaccgaggacccggaggtcctgacgtaccccgcagcggataatgaaccgctgcagctcggtggtgtgggcgacgatgcggcctccgccgcggaccgccaggtgacgacgccgggcgacgtgcacgtcgccccgcagatgcctgcgccgatcgacggcacgctgcgccagtttgcgctgcgcgtaccgagcgtgatcgacgagtgcagcggcatcatggtgttcggcaagcgcatcaagtcgctggtgttctcgaccgacctggccatcatccgcaatgtcaacgccgacgcggtgtttgcggtctacccgttcacgccgcagccggtcatcacgcaggcgctgctcatggcgagcgacctgccggtgttcgtcggtgtcggcggcgggctgacgacgggcaagcgcgtcgtgaacctcgccatgtacgccgagatgcagggcgcgaccggggtcgtcgtcaacgcgccgacgccgggccgcatcctcaaccgcatccgcagcagcgtcgacgtgccggtcgtggtcacggtggccaatgccgacacgaactaccgccaccgcatcgaggacggcgccgcgatcctgaacgtagccgccggcgcgcagacgccggagatcgtggccgagatccgcgagcgtttcccggactacccgatccttgcgaccggcggcgcggatgacgagagcatccgcgccaccatccgcgccggcgccaacgccatcatctggacgccgccgaccagcggcgagctgttccgcgacgtcatgaaaaactaccgcgagggcaagccgcacccctgatccgacagcgctttttgctttctctttctgattttgctttctcttcctgttatccaagcggaaggacgcatccattcggatgcgtccttttgttgtcttgttttgtccttcagagccggcagagcatggcgcacgcctgctcgcgggtcgcgctaccgcgcgggcagaagctgccgtcgggcatgccgttgatgacgccggcacgctgcagcgcctgcacggcgggcagtgcataggcggcaatgtcggcttcatccgtgaacgtcacggccgcattgtccgtgccgagcacgatgccgaactgctgcgcatagcggtcgagcatcacggccatgtcctggcgcgaaatattggcattcggcgcaaattcggtgctcgaaatgccgtagacgatgccgttggcagccgcccagttgacgtagggcgcataccatgcgtcggccggcacgtcctcaaacccggcactccggtattcggagacgtccgcgccctgcagtctggcgagcatcttcacgaactgggcgcgcgtgacgtcgccggtcgggacgaaggtcgtcggggtcatgccgtcgatcacgccggcttcatagagctgcctgatatacgaatagctccagcggccggccgccacgtccgtgaacgggaagggctgctcctccggctgcccggagccgtaggtgccgtagatatcgtccatcaggtttcgatagaacaggtgcgtctcgatgacgctcttgttggcgatgccgccgacgaactgcatatggtcggcgcgcgtgacaggcatgacgtaccagatgccgggccggaaggtgatgtcggaatagccgtcatagttaatccagccctgcgtaccgtcgcgcttgaggcactcggtggtgtttttgtccgtcgtggtcgggtagagcgcggacacggtgttgacaaggccgtcgttcggcagccagctccggtcgatgtagatgccgccggcggtgtacttgtcgcagtacttgcccatgttgatcgagccgggcatcatcagcgcggacataccgttcgacgggatggccgacacggtggggtagtggttgccggtgagcggatcggccgaggtctggtcgcccgcgtaggagaaatagtagacgttcggctggatctcgatgcccttgttgatctcgagcgatttgtcgatcgtcaggtcgaggaaggcgttgtcgttgtgcgacaaaaagtcggatctcagcacgcggtcaagcgcctgggcaaatgtctcgttgtcgtccttgcggatgccgaactggtcgagctggaagtcgtacacgcccttgagcgacgacaggcccagcgccttggcggcgcctgtggccaggttggcggcgagctttgtgaaattgctgttggcctcaatgaacgtcgtgccgttgtgcggcgcggcgatggcggtcagcgagtggacccagctgcccttgccgccgaggaaaaacgggctcggggccacaccggcggctttggccgcagcgacctcctccgggcagccgttggtaaggatctcgaggaacaggcgcgtcgtcgcgccgccgaagctgtggccgacgaggttcgcggcgcgctgtgtgccccagccttcgaacagcggcgtctcatagtcgatgccgtagcgctcgtggccgaagtcctgcgcgtgcttgacgccgtagtccgtgcgcgcaccgacgagctgcgcgtacagctcgcacgcgcggtcccacgcgctcgagagcgggccgacggaggcggcgtaggtctcatagccctgcgtggccagatagtccggcaggctgccggtggtcatgccccagtagggcatgatgctgaaaattttgtcgcgctgaccccagccgaacaggccgtgcacgaacacgaccgggtcgtccgagcgggtctgcgtatctgccgcggcggccgggatggcgcacaggctcagcgccagcacgagcgtcagcagcaggcacaaaaatcgacgtgtttttttcatggttttcccccctgtctcatagatccatatggttttccttctcacaaagccggcgatatacccatattataccgggcgcagccggcgattgcaagacactttgacggaaaactgtcgcgcacttgcgcaaaaaacgccccgcgccgcggcgcggggtgcttagtctgcaaacaggctccagggggaaatgtccggcggctgctgctcgaaatagagcacctcgccggtgtccggatgggcaaagtgcaggcagtgcgaccagagtgcgatcggcccgtcatcgggcagcgtgctgtactttttgtcgccccagagcggcagaccgcgtgcggaaaactggcagcggatctggtgcgtgcgcccggtctgcaggtaaatgcgcacgagcgagagctccgcgcgcgtgccgagcacgtcatagtcgagcacggcctcctgcacgcccttggccattttatccgtgacgtaggtcttacgctcgttcgggtcgcgccgcagcaggtcgcggtacgtgccctgcagggcgtccggctctccgtgcacgacggcgagataggtcttgccgaagtcgtgctcgcggatctgcgccgagagcttcgacgcggccgccggggtgcgcgcgagtaccatcagtccgctgaccacgcggtcgagccggtgcacggtgcgcacgcaggccttcgggtcgccgagcgcctgccgcaccagctcgggcacgccgcccggttcgtccgtggacagcacgcctgccggcttgatgcacacgaggatgctgttgtcctgatagagaatgtccatgtcgtcgcctcgtttcggtgtctgccgtgagtataccacaccggcggcgcgcgggcaatgaaaaagcggcggtcattgcgttttcgcctccggccggtaaaacgggatgctcagcgccatgatgaccgcgaacacgctcaggtaggtgagtacatcccggccgtgcgacacgacggccgccgcgcaaaagaagatgcagcacgcggccgttgccgccggtcgcggtgaggatcttctcggctttgaaaaacacgccgctgccgatgacgatgccgacgacgagcgcgatcgccgtcggcagaccgtattttttctgcagatcgtttcccatggcgtctccctccgctgcgtgtatgcagagagattttacgcaccgccgccgggagaatccaaggggagtgtgcgcaggataggaaaaatgcccatccggatcgctccggatgggcaaaattctggcttgtgggatgcgttacagcgcgcacagcacgatgcaggcctgctcgcgtgtcgcggtggcgtacggctggaagctgccgtccggcatgccgttgatgacgccggcgcggtgcagcgcctgcacggcgggcagggcgtaggccgcgacgctgccctcgtccgtgaaggcagtgaccgtcttctggtcaagctgcacgccgaagtgctgcgtgtagttatagagcatgacggccatgtcctgacgcgagatcgtcgtattcggatcaaacgtcgtggcgctcgtgccgttgacgatgccgttcgcggccgcccagttgacgtagggcgcgtaccagctgcctgccggcacatcggcaaacgggccggacgcatagccggacacgtccgcgtcggcgagccgggcgatcatggtcacgaactgcgcgcgcgtgacgttcgcggccggggcaaaggtcgtggcggtcatgccgttgatgacgccggcatcatacatttccttgatgtacgaatagctccagcggctctcggccacgtccgtgaacggcaggccggcgggctgatccggcgtggtcggcgccgaggtcacgtgggagagattgcccatcaggctcaggtagaactggcgcagggccgttgtgctctgcgaggacaggttgggcaccggcataccggcgatgaagttgccgtggtcatagtggcgcacgggcattacgttccacacgccgggctgatagctgacgttggagtagccgtcgcgctggatatagccggtctggccgctcttggtcaggcactttccggcgctgttggtcgggtacagggccgagacggtgttcacaaggccgtcgtttggcgcccagctcttgtcgatctggaaaccgccggcagtcgtctggttataatagctgcacatctggtttgcaaacggcacgaacagcggcgtcatatcggcggccgacgtgcgctcgccggtgagggcactctggcgcgtcttgtcgccggcgtaggagaagtagtacacattcggctggatctcaatgtcgtcgttgagctccagcgcgcggtcgatcgtcaggtcacggaacacgttgtcgttgtgcgacaaaaagtccgagtgcagcacgcggtcgagcgcctcgagcacggtctcgccgtccttgcggtagaagccgaactgctcgagctggaagtcgtacacgcccttgaagtccgagatgccgagcagctttgccatggtggtcgagacctcggcggcgaactgcgtcatgtcgccgcagcattcgaggaaggtcgtgccgttgtgcggggctgccagcgtcgtcagcgaatagacccagtcggccttgccgccctggaaaaacggggagacctccgtgccgtcggccttggccgcagcctgctcctgtgcagagccgtcggccagaatgtccagaaacaggcggatcgttgcgccgccgaagctgtggccgacgaggttgatcttcttgtccgcgctccagccttcaaacagcggcttgtcatacgtcacgccgtagcgcgcgtggccgtattcggcagcgtgagccgcgccgtagtcaacggtcgtgccggtgagctgggcatagagctcgcacgcgcgatcccacgcgctcgagagcgggccgacggaggcggcatagctctcatagcccttgcccgtcaggtacggcatcaggtcgctcgtcaggccccagtacggagtcacggcgtagatctggtcgcgtgcgccccaacccatcaggccgtggacgtaaacggtcgggtagcgttcggcaccggactgctccgtgtttgcggcggcggccggcagaagcagcaggcttccggccatcaccagcgcgagcagcagacacagaaacttcttgctctttttcatggtattgcgtacattcctttccggcgcgccggagcgcgcatttattttttgagtattataattccaaccgcaccggtttgcaatccggggaacgcagaagattttgtatcagattcggatgtgtgtgaggtttttggacacacggccgcatctgtcgcacaaccgcgcggacagctgtgcacaaatgcaaaaaacgtcccccggccgaagccgggagacgtttgcgttctggtgctcagagcgcgcacagcacggcgcaggcctgctcgcgggtcgcggtgtcgtaggggcggaagctgccgtccggcataccgttgatgacgccggcgcggtgcagcgcctgcacggcgggcagggcgtaggccgcgacgctgccctcgtccgtgaacggggctgtggtctgctccggaagtgcgatgccgtactgctgcgcataacggtagagcatgacggccatatcctgccgcgagatcgccgcgttcggatcgaaggtcgtctcgctcgtgccgttgacgatcgcgttcgcggccgcccagttgacgtagcgcgcataccaggcgtcgcccggcacgtcggtgaatgggccggacgcataggcggacacgtccgcgctctgcagcagggcaagcatcttcacaaactgcgcgcgcgtgacattgccggccggctcgaaggtcgtcggcgtcatgccgtcgatcacgccggcttcatacatctcccggatgtacggatagctccagcggctctcggccacgtccgtgaacgggaagctgccgccgctcggcgcggtggtataggtgttgtagatatcctccatgacgccgcggtagagcgcgtgcgtcttgacaaggctgccgttgagcatgccgccgacgaactggatgtggtcaaacgactgcacgggcatgacataccagatgccgggcttaaaatggatgttggagtagccgtcgtaattcgtccagccctgcctgccgtcgcgcgtcaggcaggtgccgtcgctgtggatggggtagaaggcggatacggtgttgaccatgccgtcgttcggccgccagctctggtcgatgtagaagccgccggcggtgtacttgtcatagtatttgcccatgttgatcgcgccggggtagaacagcgtccacatcctggccgacgggatgtagttgccggagaccgggtcctgcacggtctggttgccggcgtaggagaagtagtagacgttcggctcgatgccgatgccgtcgttgatctcgagcgatcggtcgatcgtcaggtcgagaaaagcgttgtcgttgtgcgacatgaagtcggtgctgaacacgcgctgcagcgtctcgagcacggtctcgttcggatccttgtagatgccgaactgctcaagctggaagtcatagagattcttgatctccgtgatgccgaagcccttggcgagcgtctcggccagatttgttgccgcgtccatgatcgcgccgttggactcgatgaaggtcgtgccgttgtggggcgcggcgatctcggtcatggagtgcacccagctgcgcttgccgccggtgaacagcgggctcggcgcagtgccggccgccttggccgcggcaacttcctcggcgctgccgttggccatcagctcgaggaactggcgcgtggtcgcgccgccgaagctgtggccgacgaggttgacggcgcgcttcgtgccccagccggcaaagagcggctggtcataggtgatgccgtagcgcgcgtggtcgtgcgccgcagcgtgcgccgcgccgtaatcgaccgtcgtgccggtcagttgggcatagagctcgcacgcgcggtcccatgcgctggagatcgggccgacggtggccgagtacgtctcatagccgagcgagttgaggtagcttgtcaggctgccggtggtcatgccccagtagggcagcacggcgttgatgccggcgcgctggccccagcccatcaggccgtgcacgaacacgaccgggtcgtccttgctgctcgggcaggtctggtctgcggccgccgccggaaagacgcacaggctcgcggccagaatgagcgtcagcagcaggcacagaaaacgtttgctgtgtttcatcatgttttccctccaaagtatatcagttttcatgctttcttatcatcacaaactccgccaaatgacgtaaaacggacgaaagtcggggaattgcggttgtgtatgttatagcacataatccaaaggaaatcctgtttttgtacttcgcgcacagttgctgtatattactctaatgttttacaacgcagttataatgcattgggactgcgaaaatttccaaactgtgtcactcgacaggcgtgtgtgagaaaaagcagggaaggatatttttgcatttttgtctgtcatcattcacaaaaattcataaattctgtatttggtttcggaaaattctacgaatatgggcacaatcttgcaaactgcataaaaaccggctcctgacattgtgaagatttggacgactttgcgcacattcattctggcggggtcgccccggttttgctataataataacgaaaagaaatcgccaaaaaccagaacagatggaggtaatggaatgagcaaaaagtatctgtattatttcagcgaaggcagccaggcgttcggcggcgacaagaccgcgatgcgcaacattctcggcggcaagggctccggccttgcggagatgaccgcggccggtatgccggtgccgcagggcttcacgatcacgaccgaggcctgcacgcagtactacgcggacggccgccagatcaatgcggagatccaggcagacattttcgcgcacgttaagggtctggaggatctgaccggcaaaaagctcggcgacgtggaaaacccgctgctggtgtccgtgcgctccggcgcgcgccagtccatgcccggcatgatggacaccatcctcaacctcggcctgaacgacgcatccgtcgagggcctggccaaaaagaccggcaacccccgcttcgcttacgacagctaccgccgcttcgtgcagatgtttgcggacgtcgtcatgggcgtgtccaagagcctgtttgaggaagagatcgacaagatgaaggccgccaagggcgtcacgaacgacgtcgatctggacgccgatgatctcaagcagctcgtcgtcatcttcaagaagatctatgaggacaatgagcacaagcccttcccgcaggacccgaacgagcagctcatcgaggcggtcaaggccgtgttccgcagctgggataacccgcgcgcgaacgtctaccgcaagatgaacgagatcccctatgagtggggcaccgccgtcaatgtccagcagatggcgttcggcaactccggcgaccgttccggcacgggcgtggccttcacgcgcgacccggccacgggcgcgaagcggctcatgggcgagtacctcatcaacgcgcagggcgaggacgtcgtcgccggcgtgcgtacgccgagcccgatcagccacctgcaggatcagatgccggaggtgtacgacgagttcgtcgccatcgccaaccggctcgagcactattttcaggatatgcaggacatggagttcaccatcgaggacggtaagctctacatgctccagacccgcaacggcaagcgcaccgcgcaggcggcgctgcagatcgcgtgcgacctcgtcgacgagggcatgatcaccgagcgcgaggccgtgctgcgcgtcgagcccaagcagctcgatacgctcctgcacccgcagtttgacgccgaggcgctcaaaaaagccgacgccatcggcaagggccttgccgcatcccccggctctgcctgtggccagatcgtgttctccgccgaggaggccgaggaagccgtcaagaacaagaccatgccgaaggtcgtgctcgtccgcctcgagaccagccccgaggacatcgtgggtatgcaggtctcgcagggcatcctgaccgtgcgcggcggcatgaccagccacgcggccgtcgtcgcccgcggcatgggcacgtgctgcgtctccggctgcggcaacgacaacaccgtccacatcagctatgcggataaagtttttgagatcaacggccaccgcttcacggagggcgactggatctcgctcgacggcagcaccggcaacatctacgccggccagatcccgaccgtcgccgccaccggcaacaagaacttcaaccgcctcatgggctgggccgacgcggcccgccgcctgaacgttgaggccaacgccgacaacccgcgcgatgcgcagcaggcggtcgatctcggcgccgagggcatcggtctgtgccgcaccgagcatatgttcttcgccgaggaccgcatcaaggccgtccgcgagatgatctgtgcccgcaccgtcgaggcgcgcaaggtcgcgctggcgaaggtcgagccgttccagcagggtgactttgaggccatgtaccgcatcatgggcacgcgcccgatgaccatccgctatctcgatcccccgctgcacgagttcctgcccacccagaaggcggacattgaggagctggcgcaggagatgggcatgacgtttgacgagctgcaggacgtcgtcgtgtccctgcacgagttcaaccccatgatgggccaccgcggctgccgcctgtgcgtcacctatccggagatcgccgagatgcagaccaacgccgtcatcaaagcggcgctcaaggtcagcgccgagaccggcacgatgatcacgccgtacatcatgatcccgctggtcggcgagcgtaaggagctcaagttcatcaaggacatcgttgtccgcacggcggacgcgctgattaaagatgctggcgtggacatgaagtaccacgtcggcacgatgatcgagatcccgcgcgccgcgctcacggccgacgagatcgccaaggaggcggacttcttcagcttcggcacgaacgacctgacgcagatgaccttcggcttcagccgtgacgacgcagcgaagttcctcggcgcgtactacgatacgaagatttacgagaacgacccgttccagcacctggacgtcaacggcgtcggcaagctcgtggagatggcctgcaagctcggccgccagacgaatccggggctcgagctcggcatctgcggcgagcacggcggtgacccgtcgtccatcgcgttctgccacaaggtcggcctggactacgtgtcctgttcgccgttccgcgtgcccatcgcccgcctcgccgccgcgcaggctgccatccgtgaggaacagtgacccggcgctttgcgcgcaccaatcgcagccccgcttcaaacggccgcattcccaaattgggaatgcggccgttttttgtatagcgaaaaccactcgctaggcgagtggttcaaaaaaagccttgtggcgatgatgaagacaaaaactccttttgttttagaatgagcgtgcggtctgccaactgcacgaaaaagcaaaaggaggtcattacatgtcggtgtccagttttatggggtacttgaaagggaagagcagtctgatgatatacgagaaatacccggaactgaagtacaagtatagaaatagggaattctggtgcagaggatactacgtggataccgtcggcaaaaatgcaaaggtgcagacgatcgtgaggaggttgacggctttgtcatgaaagagcgcgtccaaaattttgcagctcagatggttgatgccgatgacaaacacaaagttcatgacgaaattgagcgccggatccgcacgaaagagcatcaggatgcagtcatacagcatcagaccgagctgatgcggatagcggtatatatatccgcctttttgcaacatggagcagtcgccgagccggaacgcctttgcggcattgaagactgatttggcgtctgcgcgcagcgtggtatctacgttcaggatcaggtagagggcggcgaccgcatagagcgccgtcagcaggcaaaacagcttttttcctcgatgctgcgcaccggaaatcggccgcgcacaaaagcggccgcgacgatcaggacggcccagatgacgagcacaagcaggctgaatttcagactgccggaaatggtcgttacctcatattcggtatagcttacttcggattggtacagcacgttgagcaaaaagaccagtaccgtgagcaggcaggccagcgccgtcatgatgccgtggctcagacgatacaatctgttgtgcatggcagtgatcctccggtcatgcaggatgagccccagatgggggtgcaaaatattggattttattatatcacttcatgccggcgatgtaaatttctttacatcgccattgcaaatgcggccggcgcgccccgtgcggggcgcgccggctgcatggttcatgcctgcggatttattttgctgtgcgccgccgcgaaccggcgcgccggccggtagacgagcagtgcgatgaagatgagcacggccgtggtcgcaaggctgatcgggtacacgagcatgatcgaccggaacgtgtggtgcagcggaaacacggtgttgatccacacgatgcgcacgccgcacacgccgaagagcgtcaggatcgccggaacgagcgagatgccaaagccgcgcaggtagccggacaggatctcatacgtcaggctgaagatatacgatccgaagagaatgagcaggcggctgtagccgatctcgatgacctgcgggtcgttgttgaaaatggccagcagatacttgcccgtcagcagcacgatcacgatggcgatggccgaggcgatgatgtcctcgccgagggacagaagcatggtttttttgcagcggtcgatcttgccggcgccgtagttctggccgacaaaggtcgtgcaggcctgactgaaggagttgagtacgtcgtaggcgatgatctcgatgttgaacgcggcgctcgaggcggccatgacgacggtgccgaggctgttgatggccgactggatgatgatgttcgacaccgagaagatcgcgctctgaataccggccggcagaccgatgcgcatgatcttgcggaagatggcggggtcgatgcgcagctgcttcagctccacgcgcaccagatcgccgtgcagcagacggcgcagcagcagcacggaactgaccgcgttggagagcaccgtcgcaatggcgacgccgttgacgttcatcttgagcacgatgacgaaaaacaggttgaggatcacgttcaggacgccggagaccgtcagcgcgatgagcggcaccttcgtgtcgccgacgctgcggaagatggccgcctcgaagttatacagcaaaatgaccggcatgcccagcaggtagatgcgcagatacgcgagcgcgagcgggtacacatcctccggcacgttgagcaggcccatgagtccggccgcgatgaactggccgaagaccgctacgatcacgccgccgatgagcgccgtgacgatggaggtgtgcacggcgcggtgcacggtctcgcggtcgccgcggccgatggcgttggcgatgacgacgttcgcgccgagcgcgatgccgatgaacagattcaaaagcaggccgatgaccgggctgttcgcgccgacggcggccacggcggccgtgcgcatatcgcccgtgaagttgccgacgacggcgatgtcggccgcgttgaacagctgcccgaggatgccggtcgcggcgacgggcagggcatagcgcgggagtttattccagatcgggccgttgagcatgtccagatgctgcggcttggtcgctgtctgcatagatcttctcaccttttcttacaaatgggtaaagttccaaggccctatgatatgccaaaggcggcacggatgcaagagcaaaaatatacaatttcttagcggccgcttccgctcggatacagcaggaaagtgcccggacaaacgcggctgtgtttgtccgggcgctgttttttcccgaaggaggactgcggacggtgtccgccgcttattccgcgctcttgagtgcttcatccatggggatcttccggatgcggcggaaatcgaagatcgtcacgatggcgtagccgaggagcacgaacacgaacatcttgacatatccggccggctccatgtggaaggcgaaccagccgctgtaggagaacatgatctcccgccaggccagcttcatggcggcggcgccgagccagacgctgacggcgtcgatgagcacgagcacgatcgtcgtcgacagcaggtacagccgcgcgatctcccggttttcatagccgaggatcttcaccatggagatggcgttttcgttcttttcaatgatgagcttggtcagcaggtagatcagtacggccgacagcagcacgcacaggtactggaaataggtcatgtaggagcccatcgagtggtcgagctgatcggccatcttcgtgatgtcgcgctcggtgatgacggtcgcaacgttgtcctcgtcgatgtccgtgatctccgtgtcggacagaaagcccgagaaagcatccgcgtcgaggtcgaagatgtcgcggtaatgatccatcggcaggaacacggcgatgctctggcagcggtcatagatgccggcgaccgtgaaggtgtactgcttgctctcgtacttttcgtccagcgtgaacgtgtcgccgacggccagacggtatttgtcggcatagggcgcggagatgtagaccttattgccttccagcccggagaggttatcgatctgcacgtagcggctgccgtccgcgatgccgtagacgctgacttcctcgtcgagcacgtcgctcttgcgcacgagggaggtcatgcagaaggcttccgcgtccgggttttgcgtcgtgacggcgtcgccattttcgtcctcgcaggatttgagcacgtactggtagtttgtaaacatcatgtcggccgtccggctctggtaatacttgagcgtgctgggcataccgatggccatggccagcatgaccatgatgaagaacacgccggcgaacaaaatgaggtagtttgcgatgttctggtagatgatgcgcagccggaagcgggcgaagaagctccagtttggcaggcggagcgcctttttgcgccgggcctttttcaggtcgtggcgcagaaactgcagcggcgtatggcgcatcatgcgcgtgatgatgagaaagttcaccacgaacatcagcacgaccgggatcagcgtcgtgcgcaggaaagcgtccggattccagacggtcttgtacgtcggcaggctgtagctgttgtagtacatggacacgacgacgtttttgaacaccgtgtagcccagcgcgttgccgacgcaggcggcggccagcgtcacgatgacgggcatggccagatagtgccgcaccagctcgccgcgcgtatagccggaggcgcgcagcgtgccgatggcggaggcttccttcgtgatggtgttgttgatcgtgacggcgaagatgaaggcgatgatcacgatgaggatgtcgagcagcacgccgcccatcgcctcgtccgagcccatgtcgtcgggcgcgaagttgatggcggggttggcgtagcgcggcgtgtagtcctcgagatcattttccgccacgaccgtttgcgtcagcagcgcgcgcagaaagtcgtccgacagcgccttctcggccgtctcgtccgcgggcacgtcggcatactgccaggcgtagacatagtgcaccggcttctgcaggcgggcaaagccgccgggcgcgaccatggcgacgtcaaacttcagcgcgtcgaacatgagatccgtcgccttttcgtgcagagtggcgtagttgacgtaggcgatcaggccggagatgcggtaggtcttgccgccgacggtgatcgtgtcgccggtgcgcagaccgacgttgtcggcgtgcatgcggtcgatggcaatctcatcgtcgcgcaccgggaacgcgccgtcgatgaggcaggcgaggttcacatcgttcgtctgggtatagacgcggatggtcccgtccgacgtgccgtcgttgtcgtgatcctcgtcctcgttgcggtagaagttttcatacagcgtcaccggcacggcctgaaaatccgggtcgttgaggtcgtatttttcctccgcgtcggcatacttttcgtcgatctcgtcggcgatctttgcccacgcctcgttataagcctcattgtaggcggaagtatacgcgctctggtaggcggaggaataggcgctctggtatgtcccgtccgccttcgcctgcgcgacggcggtgtcgagcatggcggcggccgtgtcggcgtcaagcccgccggcgagcagcgtctgcttcacctggttttgaaactccgcgtcaaacttcgtgcggaattcgctgtcgaactggccgcggaattccccagggaatttttcgtcgagctcccggcgcgccttgtcggtgtaaaactgccggacgtccgccttgtcgccggtctcgatcgcggcgagcagcgtatcgtccgcggcgcggctgagctcgaagtggccgtactcgagcttgtaggtcgtcacaccgtcgacggatgcgcgcatcatgctctcgttggcaacgtacatgccggacacgaagccgatcgtcagcaccagaaacaggaacacgaccagatacttgcgccagtctccggcgagctcgcgcgggatgcgccgggtcaggggattggtcctctttttcatcctgtcacgccccttaccattcgagctcggcggccggaatcctgcggctgttgctctcgttgctgcgcacggtgccgtcgcgcagcttgatgacgtggtcggccatgttgcggatggcctcgttgtgcgtgaccatgatgacggtgttgccgtactttttgttgacgttttcgatcagctgcaggatctccttggacgtggcatagtccagcgcgccggtcggctcgtcgcagaggagaatgtccggattcttcacgatggcgcggccgatggacacgcgctgctgctggccgccggagagctggttgggcagcttgtgccggtgctcgtagagcccgagcgtgtgcagcagctcgtcaatatccagcggcgcgtccgagagataggcgccgacctcgatgttctccttgacgttcaggttggcgatcaggttatagagctgaaagacgtagcccaggtgcttgcggcggtactgcgtgagcgctttctcgcccatgtcctcgagcttgtcgccgccgatggagatgaagcccgcgtcggcgctgtcgatcccgccgatgatgttcagcagggtggacttgcccgagccggaagggccgagcaggacgcagatctcgccgcgcgcgaccgaaaacgtcatcccacgcaggacctcctgccgggtctcaccgctgccgtagccctttttcaggtccacgatctccagaaatttgttttcttctgccatgacatcctctttctatgcaagcgcgccgggatgcggagggaagcggcgtgttgtcatgtggtatttcgttagatacatctaaccaatgtttatggttaaagtagactaaccggtgaaagagtatagcatatccgcccgcggatggcaagccccaaaatggcagaaaaatgggcaggcaccgtgcccggtgtctgcccatgacggaggggtcagttgatcttgagcgtctcccagagactgttgacataggtcagcgtgtcctggtcgaggttgcggtaggcgctgcggttgtatgcatcgcggaacgaaccgatgtcggggtagaggatggccatcgtgtcctcgcccatgtcgtcgatatactccgggtcgtcatacacgagccggttcggcgaggcgtagtagatatactcggcgttggccacggcggcctcgcggctgagcatgaagttgatgaagcactcggccagctcctgatcccggcagcttgtcgggatgcacatggcgtcaatgaagtagttcgtgttctcggggtagtaaaactgcagatccacgctgtcggcctgtgcgtcgcacatcgtgaagtagtcgcctgcgtagtaggcggccacggcggcctcgccggactccatcatgttgtagatctcatccatgacgtagctcttgacgagcgggcgctggtcgacgagtgcctgcagtgcctgctgccagtcggcgtggtcggtcgtgttgacgtcgatgccggcgcggtacatggccgtgccgagcgcgtcgcgcgcgttgttgaactgcaggatgttgcctgcgtatttcgggttccacatcagatcccagccgccggtgtcggcctcgtccacgacattggcgttgtagatcacgcccacgatgccgtaggtgtacggcacggtgtaggtgtcgtcggggtcatagtacaggccgcggaagtcctcggagatatactgatagttcgggatgttgtcgtagttgagcggcaggagcatgtcctcggcttccatgcgcgcgatcatgtagtcagacgggatgaccacgtcgtagctcacggcgccgctcttgagcttggcgtacatgtcctcgttgctggcgtaggtgtcatagttgaccttgacgggcacgccgtaggtcgccttgtaccagtcctcgaacgcggcgatggtgtcgagcgaatcgtccgagccgtcggagatatattcgccccagttgtagacgttgagcacgcgcgtctcctgccggctgctgtagatgctgatgccggcgatgagcagcgcggcggcggtgaggatgcccacggcggcgcgcacggggcggcggccgctgccgctgcgcttggcgcgggcgggcttgcccgcgcgcttggcacggcgggcgtcgcggatgcgctgcgtgtcgtcctcgtcgacgaggttcgtcagcagcagcagcgcgagaatgacgaagaagatgatcgtcgccagggcgtacattttcggcgtgacggtctttttcgtcatgttgtagatgcggatcgggagcgtctggaagccgctgccctgcgtgaagtagctgatgacgaagtcatcaagcgagagcgtgaaggccatgatcatgccggtgatgatgccgggcaggatctccggcacttccacgcggaaaaacgcacgcaccggcgtgcagccgagatccatcgcggcctcgggcagcgagcggtccatctgctgcagcttcggcagcacctgcatgatgacatacggcaggcagaacgtgatgtgcgccgcgagcatcgaccagaagccgagactcgtggacgtgccgagcagccggccgaagaacacgaacatgagcatcagcgaaatgccggtgatgatgtccggattcatcatggggatgtcggtcgccgtgtcgagcgcggcgcgcagatatttgttgcgcatccggttcatgcccacggcggcagccgtgcccatcgcggtcgagacgaccgaggcaatcacggcgaggatgagcgtgtttttgagcgcgttgagcgtttccccgtcgcggaacagctcctgataccattttaatgagaagccggagaacaccgacaggctcttggcctcgttgaacgagaataccagcaggatcacgatcggcgcgaacaggaacacgaagatgagggcggtatagatcttagcagctcgtttcatgtcacacacctccgtagacgcgcttgttcgtgccgcgtttcatcagggccatggcggccagcaggatcagcatgaggatgaaggcgatggcggcggcaaagtgcaggttattggccacgtactgcccctcgatcgcgtctccgatgaggaaaaacttgccgttgccgagtttctgcgagatataaaaggtgctgatcgacgggatgagcaccatcgtgatgccggacatgacgcccggcaggctcagcgggaagatgacccgccgcagcacgccgagactgttgcagccgaggtcgcgcgcggcctcgatcaggcgcgtgtccatcttggccatgaccgagtagatcggcaggatcatatacgggaagtagtcgtacaccatgccgacgacgacggcgccctcggtgccgatgatgtgcgcctggccgaggtgcagcgcggaaaagagcatgttgagcaggccagagtcctgcaggatggtcatccacgcataggtgcggatgaggaagttcatccacatcgggatcatgatgagcgtgatgatcgtcttctgcgtgcgcggggcggcgcgggcgatgatatacgcgatggggtagcccatgagcaggcagatggccgtggagatgacggccagcttcaccgagcgccagaagatgagcaggtacgtatgcacctcgcgcgcagcgccgctgtcgtcggtgatcgtgctcacggcggtgaaaaacttcgtcaggttttcggtcgtgaaccggaagctctcgtccgtgaacgcatagtaggccacgaacacgagcggcacggccacgaagatgaccgcccacacggaatacggtgcgagcgccagacgatgcgccagcgaggcgcggcggttttcggaatggatgcgattgttcattcgtccggctcgctttccgcgtccgagagctcgtccagctcgttgctgaacgaggagtagtcgccgtacatgcccgaatactcggactttttcatgatgtggatggcgtccggctcgatatacaggccgacctccgcgccctcgtcgacgtagtccgtcgtctggatcatccacttgaagccgttgatgtcgatgatgatctcatagtgcacgcccatgaacgtgacggacgtgaccgtgccgcgcagcatgcccttttcgatgggcacgatgtccacatcctcggggcggatgacgacgtccacgttctcgtttttggcaaagcccttgtccacgcatgtgaacgtatggcccgagaacgtcacgcggaagtcctgccgcataatgccgtcgacaatgttgctctcgccgatgaaatccgccacgaaagcattctgcggctcattataaatatcgagcggcgtgccgatctgctggatcttgccctcggacatgacgacgatcgtgtcggacatgctcagggcttcttcctgatcgtgcgtgacgaacacgaacgtgatgccggtggccttctggatgttcttgagctcctgctgcatgtccttgcgcagcttcaggtcgagcgcggcgagcggctcgtcgagtagcagcacgcgcggccggctcacgagcgcgcgcgcaatggcgacgcgctgctgctgtccgccggacagacgcgtgacgttgcggcgctcgaagcccgtgagcttgacgagcgcgagcatctcgttgaccttctgctcgatctcgttgcgcggcagcttctgctcgcgcagcggaaacgccacgttttcaaacacgttcaggtgggggaagagtgcgtagcgctggaaaacggtgttgatgttgcgcttgtgcggcggaatgtcgttgatgcgctcaccgagaaagaggatgtcgccctggtccggcgtttcaaagccgccgatcatgcgcagggtcgtggtcttgccgcagccggacgggccgagcagcgtcagaaattcgttgtcgtaaatgtcgaggttgatgctgtcgagaacggtctcgccgtcaaactgtttgctgacgttgcggagttcaatgacttttttcatggctgtgtttcccccttgtgcacaaaaaacgccgctgcagatcagcagcggcgcttgtgaacaaacatatgccattgggcgcgcagcggccgtccgcggcccgtgcgcaccgttcccaacaggatgttgtgtcttgagagtctatatagcaaagattacttttactactcttattgaccatttcacaagtttggatgctgaaagcagcctggttttaagtgaccaacttataaaactcgagcttttaactcaatcaataaggcaacagaagttgccaccgcacgcggtgcggtttgcggcattcgacccggctgtccgtatggccttggccgtcgcgcggggcgcggcggcggtcgcatcttgcttcggaaagactctaggcatcattccaattgagacgattcattgtagcaagatttgcacgtcctgtcaatcacttttcgacaagaatcgcacttgccgtccgtacctgcactgagggcggcagagcgactttgcaagatggtttacataattatattttactgcaggaaaagatcgtcaagcaaaaaacgcagccacattttcgctgaaaaatcagtgtccgcacaggtgaaacgtttgtctgttccttgcggaaaatgatttacataattccaagttcttcgacatttttgtgcgtacgttatgaaaagttgacaaaaacggatgtggatatttgtcattaatttcacttgaaagatcccgggtggcgcgctatcataacattagcggtatgtttacactttgttcttagtttgttcatgaaattggtgaaatcataccatgaaaattttgcatcaaacagggaggacggcgtatgacccgcgaggaagcgctcgacaaactgtgccacagttattcgggatattttgatgttgtgcgccacgaggaaccgaagggttatctcgtcgcagaggccgggctgcacatccactccgagaagtatgtgctggtcaaggccgccaagctctgggaagcggacaacaacgaatatgtctacattttctcggcccccgtgctcacgaaggagatcttcgagcagtgccgcgagcaggcgcgtgccgacggcatgcagcggatcgagccgggcccgaatcatatgtgctcttatatcacggcgatcttcttgtgtgacacctgtgagccggatgcgctgcgcgccctgcgccgcacgcgtatttataagagcttcaagcttgcgttccacggctggatggattaccacaccggcgtcgtggagctcagcaccggcaaaacggctgccaatggcagcggacgcagtacagcacagttgttgaagacaacactgtttaagaatatgaaagaagggagttaattcaatgaatgctgctgtaattctgattgttggcattgtcattctcgccctgggctacgttttctacggcggatggctgtccaaacagtggggcatcgacccgtcccgctcgacgccggctcacgagctggaagacggcatggactactgccctgcaaaggcccctgttttgatgggtcaccacttctcctccatcgcgggcgccggcccgatcaacggcccgatccaggccgctgttttcggctgggttccggtgctgctgtgggttctcatcggcggcatcttcttcggtggtgtgcatgactacggcgcgctgtttgcctctgtccgcaatgacggccagtccatcggcaccgttgtcgagaccagcatcagcaagaaggccaagcgcctgttcctcatcttctcttacctgaccctgatcctggtcgtggccgcgttcgcgtccatcgttgccaacacgttcaaggccacctatgtggatggtgttgtggatatggcggcttccgcggccaacgccacgacggcgatcatctcgctgctgttcatcgtcctggccatcttcttcggtttcttcgtgtaccgcagaaatgcgccgatcggcgtgtccacgatcatcggtgttgtggccattgccttggtgatgtggcttggcatcaagtggcatccgatctacctgagctaccagacctggatgatcatctgcggcatctacattctggtcgcttccgtcacgcctgtttggatcctgctccagccgcgtgactacctcagctcgttcctgctgtatgcgatgatgatcctcgcgatcgtcggtgtcattggctgccacccgacgctggatatgcctgcgttcaccggcttcaaagacaccatcgccccgacgggcagctcccttggctatatgttcccggctctgttcgtcaccattgcctgcggtgccatctccggcttccactccctcgttggttccggcacgacggccaagcagctcaacaatgagaaggacgcacagcccatcgcctacggcggcatgctcattgagtgtgtgctcgcgctcgtctccctgtgcgcggttgcgtacatctggcaggattacaaagccggcacgactgtcaccccgaccgtcgtgttcgcgaccggcctgtcccagatgctcggcaagatcttcggctccggcgccgtgtccgtcacctacacgctgatggtcctggccgtgtccgtgttctgcctgacctctctggataccgcgacccgtctggctcgctacatgttccaggaattctggctcaagcccggtgagaaggccggcgatccgaccgtgaccggcgctcgcaaggtcctctgcaatccgtacgtctccaccgcaatcaccgtcgtgctcggcattgcccttggcatgaccggttacgcaaagatctggcccctgttcggcgctgccaaccagctcctggccggcctcggcctgctggccgtcgccgcatggctcggcaagatgggcagaaacaacaagatgttctacttcccgatgatcttcatgatcctcgtgacgctgacgtctctggtcttcaccatcaagtcccagatcactgcgatcatcgccggcggcaccggccttgcatggtgctacatccgcgcgatcctggccatcctgctggtcatccttgccattgacctcgtcgtcgagggcagcaaggcactcgcagcgcaggccaaggcgaagaaggctgcctgattcggcgccaaccagccaaaacgcaaaccatataaagagcacgctgctttggcaacgtgctctttttgctgtctatcgtcaagatgcggcagggaaacggataaagtgtcgctagggagctcgaggggacaaggcccgcctcgaatgcgatccggtcttttttatgaccggtgaaa

SEQ ID NO: 13965 - DNA, 8951 bp, Unknown
  gut microbiota DNA sequence
actgtatcgttgaataagcctccgttgaaatatcaattgcagttacgatcgctcccaactttttgaataattttcgagccgagccgacataaccggtgtagccttcacgcagtgaagctgttggaataaatgcgactttcttattttcaatttcttcctttatcagacttcctacacttgaaaagtgcgaacataaaaataatttcatcaatattctcctttataaatttcgattttgcgcgctcccgtcggagcggcaaaccggagtccctaatcccgccgccatatcatttcgcagtccggttcgccgcgctgaaggggcagcgctttccgatgcactgattgttctgcgcggcgtagcggcacacgacctcctgcttttgcagtgcgatgccgaaatgctccttcacaaaatcgatcgccgtgagaatggacaaaaacgagtcccgcttgcagcagcgcgggccgccgatctcaccgatctgcccgagcgcggccgccgtcattttgtgcgacagcgcaaacggctcgtcggtcagcggcgttgaccgggagatgatcgagacgaacatccccgtgctgatccccgcgccgcacgcgccccagaagccgcacgcgccgccgggcacgcttttgccgcggcgcagcatctccatgagcgcgtcggaaaggtcaatgtctccgccggcgttgtgatacgccgtcagcagcgccgcgccgaccatcacatggtgctccggcccgtgcatatggcagctcggcagcgccatcatccgctcgacaatggcgatcggatcgcacgcggtctcccgcaggcacagctccacgatgctgtcaagcccctgcatatggcaatcgctgcacacgtagtgcccgtttacgcagcgcgtcttggcgagctcttttttgcggcagatctcgcactgcatctgcacatccgtctccagatattccagcggtgcgccgcagatcaggcattcttctttcattcgcgtttctcctctccgacttcggggtgtgtgtgcgtatagcgcgtctcccacaggatcagcccgcgggcaggcgctgccggcccggcggcactgcggtcgcgcgcggcgagaatggccggcatcgtgtccgcgtcccgctgcccgagcccgacctccagcagcgtgccggtgaggatgcgtaccatgtggtacaaaaagccgtcgcccgagaacgtcaggcgcacttcctcgccccgccgctcgacggtgatggcatcgaccgtgcgcacggcagattttttcatgcgccggttggcgcagaacgacgtgtagtcgtgcgtgccgcacagcggcgcggccgcgcgctgcatggccgccgtgtcgagcggctgcggcagggcgcagacatagcgccgctcgaacacgttcggcgtctcgctgttccaaatgcggtagacatacgtcttgccgcggcaggacaggcgcgcgtgaaagcgcggcgcggtttcctcgagcgtgagcacgccgatgtcccccggcaggcgcgcgcgcagctgccgcagcagctccggcgcgggcaggtcggtcttcgcgcggaacgacgccgtctgcatccgggcgtgcacgcccgcgtccgtacggccggagcccgcgacctcgaccggctgcgccagcaggtcgctgagtgcggcctcgagccgcccctggatggtgtccggcgtgttgccctgccgctgccagccgttgtagcgcgtgccgtcatagctgagcgtcatgcgaaaattcggcatggcgcacctcctttggatgaaagatgaaaacgcggccccgcaggttgcttgcggggccgtgcgtgtatgttctgcggaaattacgccttcggcgctttcttgccggccttgccgaagtgcagctccttgaggccctcgacctcgtcgcacacgggcttgaagctgcagctcgcgcagtcgagatcctcgggcatgccctcgaggatggtgttcatggtcttggtcacgtcgtcgatcttcttggccgtgtcgtgcagggtcttgaagtcgacgttcttcgtgatgaagatcacgcgcacattcgtgatgttcgggtttttcttatactgccggataaagtcgcagccgaccttgtaaaacgagatgcccttcttgatggccttcttgctcacgcggatctgctcgcggctgctctcgggcgagacgcgcatcatgtatccgtccgggaagacatggtacttcacgaactcgatgttgcggatggcggtgtaagtcgcgtctttgttctcgacgtcgatgtccttgacgccgagtatcacgaggcgggcaaatggcacgtcgcccttgatttccttcatatccgggccgtagagcagcacctcgtccgccgggacgagactgctgtcggacgtgacgcaggtgaagttcacggcgtcgttcgcgccgccgccgagctcatacgcagcgtcgcgcaggagcacgagctcgctctcgccgttatctttccacgcatcgcgctctttataggcccacttctgcgtcggcgcgccgagcaggtcggtcgtttcgcgaataaagctgtcgtacagttccatatccttcatgttgttccctcctcaaaaaatgcccaggttgtgcagcgcctggtggacaccgaccatgatgttggagtcctccggcagctcgaacacgctcttgccatggatgtcgttggcagcgtggatcggatcggtggggatgtaggcgagcacgtccaccccgtcgagcttgacgagatcgttcatgctcgggtcgaccacgcggttgacgatcatgccgatgcgctcgtaggtgatgaggtcatcggccgcctccttgatctcacggcaaacgttcacgcccttggcgctctggtcggtgacgaggaccaggtgcgagacctgctccatgacgcggcggctgatctgctcgatgccggcctcgccgtcgatgaccacataatcgaaatcattggcgagcatgctgatgacttccttgaggtaggagttgaccgagcagtagcacccggcggcctccggacggccgatggccaggaaggcgaagccgtcgcactcgaccatggtgtcaaagatgcggaagcgcgcctcgttgagcacctcgatggcctggcggtactcgccgcgctccgaggtctcgatcacttcgttgcggatgtcgtcgatcgtgtgctcgacgtgcacgcccagcgccgtggacaggcccacggccgggtctgcgtcgatggcgaggatgcgcttgccggggaaggcctccaccagctcgcggacgatcgccgagcacagagaggtcttgccgacgccgcccttgccggcgactgcgatgatcttggctttcgttttgttttcttccatagtgcgttccctcctgacggctgaaaaatttgcggaagctgcggcttcgattgcatccatcctaccacagatccggcagatctttctgtgtccaggtcacaaacctgccccaacacaggatgtcattcccagacacatgcgccgttttctttgatttttcgacaaaaatggagataatcgttattttttgtccagattgcaaaaaaagaattgcgaaatttatcacgtattagtataatgttttgcatgacctcgcgtcaagtgcttgttgcaaatttcacgagcaagaattcactttttattctcaaaggagaaccctatgcgcggcattgaaaccggaaaagtacgtatccgtcacgaagtattcacggagatcgcccgaatggcctatgagggcggcgattacgcaaagcggctcgaagagctgccgttcaagatcatccccggtgagatcggttcctaccgggacagtctgtttctcgagcgcgccgtcgtcggcgagcggctgcggctggccatggggctgccgctgcgcaagttttcggagttttccctgctctcggacggcgtggaaaaggcgctcgacccggagatctactacgaaaaaccgctcatcaacgtcatcaagttcgcgtgcaaccgctgcccggacaacgttgtgaagatcacgaatgtgtgccagggctgtctggagcatccgtgcatgtcggtctgcccgcggcaggccatctcgcggcagaacggccaggcccacatcgacccggataagtgcatccgctgcggacgctgcctgaaagagtgcaagttcaacgccatcgtgcgtctcgagcggccgtgccgcaaggcctgcggcatggactgcatccattccgacgggctcggccgcgccgacattgattattccaagtgcacgtcctgcggccagtgcatggtcagctgcccgttcggcgccatctcggacaagagccagatctttcagactattcaggccgtcaagagcgatacgcctgtttacgtggcgctcgcgccggcgttcgtggggcagttcggccccgagggcgtgcccgagcggatgcgcaaggcgttccagcgcctcggcttcgcggacgtgtacgaggtcgccatcggcgcggacctgtgcgtgatcgaagaggcggcggactttctggaggaagtgcccgaaaagcacaaattcatggtcacgtcctgctgcccgtcgtggagcgacatggtcaaaaagctcttcccccagtttgaaaagaacatctccgtggcctttacgcccatggtgctcaccgcgcgcatgatcaagcgcgaccacccggactgcaaggtcgtgttcgtcggcccgtgcgactcgaaaaagctcgaggcccggcgtgaaagcgtgcgcagcgacgtggacttcgtgctcacgtttgaagaggcgctcggcatcttcgcggccaaaggcatggacaaggcgttcccgcccgaggacgaggaggagatgcccgcctactccagccgcgacgcgcgccgctttgcctactccggcggcgtggcacaggcggtcgtcaacgccatccacgacatggaacccgagcgggaggtcaaggtcgccgcggcgaccggtctggccgactgccgcaagctgctgatgatggccaaggtcgggaagtacgacggctacctgctcgagggcatggcctgcccgggcggctgcatcgccggtgcgggcacgctgcgcccgatcgagcaggcgcacaaagaggtcgaggcgttcagctccgaggcgaagttcacctgcgccaacgacacgccgtacatggactacctgcccctcatcgaggagaaggacaagatccgcaaactgtgattccctgcgcaccgccggcggcggtgcgcagtttttatcatatgtccaaaaaaaggcggtcacacccctgatttttttccgtgctgcgggctggacaagcgcgcccgttcgcggtacaatagcaaaaatcatcaccggggcgcgacccgctccgctttccacactgtatattgttataaggaggtctttcccatggcttacttcttttccggccagtcgcacacgttcaatgagtatctgttggtgcccggctactcgtcgagcgagtgcatcccggacaacgtttctctgcgcacgccgctgacgcgctttcgcgcgggcgaggaaccggccctgtcgctgaacgtgccgatggtctcggccgtgatgcaatccgtgtccggcgaccggctggccgtcgcgctggcgcaggagggcggcgtgtcgttcctgtacggctcgcagtcgatcgaggacgaggccgcgatggtcgcccgcgtcaagagctacaaggcgggctttgtgcgcagcgactcgaacatcagccccgacgcgacgctttcggacattctggccctgcgcgagcagaccggccactccaccgtcgccgtcaccgaggacggcacggccgacggccgcctggtcggcatcgtcacgagccgcgattaccgtgtgagccgcatggcgcccgagacgccggtgcgcgcatttatgacgccgcgcgagaagatgatcaccgcgcccgacggcacgtccctgaaggaagccaacaacatcatctgggagcacaagctcaactctctgcccatcgtcaacgacgagggccgcctgtgtgcgttcgtgttccgcaaggactatgacctccacaagcagaaaccgaacgaactgctcgacagtcagaagcgctacctcgtcggcgcgggcatcaacacccgcgactatgccgagcgcgtgcccgcgctggtcgacgccggtgtggacgtgctcgtgatcgactcgtccgagggctactccgagtggcagaagcgcacgctcgagtggatccgcgagcgctacggcgacagcgtcaaggtcggcgccggcaacgtcgtggacgcggacggcttccgcttcctggccgactgcggcgcggacttcgtgaaggtcggtatcggcggcggctcgatctgcatcacgcgcgagaccaagggcatcggccgcggccaggcgaccgccgtcatcgaggtctgccgcgcacgcgacgagtacttccgcgagaccggcatctacgtgcctgtctgctccgacggcggcatcgtgcacgatcaccacatcacgctcgcgctggccatgggcgcggacttcgtgatgctcggccgctacttcgcccgcttcgacgagagcccgtcggacaaggtcaacgtcaacggcacgctcatgaaggagtactggggcgagggctccaaccgcgcgcgcaactggcagcgctacgacctcggcggcagcaagaagctgtccttcgaggagggcgtggactcctacgtgccctacgccggcaagctctccgataacgtccagcagacgctggcaaaggtccgctcgaccatgtgcaactgcggcgcactgaccatccacgagctgcaggaaaaggcgcggctgacgctcgtgtcctcggtgagcatcgtcgagggcggcgcgcacgacgtcgtgctcaagacctcgaataagcccgtgtgagaacacagatacagataaaaaacagacggtgcccggcatcacagccgggcactgttttttcttcccgcgcgaaggcggaaaaatatgcgtgggtttttcggtcgcggcgtgtataatggagtagaaacacagccgggaggaggcgaggacgtgcaggagcaggagatgatcgcacagctgctgcagcaggatgagcgcggcatggaggccctgctgctgcactacgggccgctgatgcgctacatcattgcgccgatcctgccggacccgcaggatcgggaggagtgcctgtcggaggtgtccatgcgcgtctggagccgcatcgcgcagttcgacccggcgcgcgggagctggaatgcgtggctgacggcggtcacgcgcagcacagcgctgaactatcagcgcagcgccgcccggcacggcggcacgcagactctgccggagggcgcaccgtcgccggaggcatccccggaggaggcgctgatacaagccgagcgccgcgccgcgctgcacgatgcgctcgcacggttcggtcagaacgaccgggcgctgttttaccgaaagtattattacttacagtccaccgcacagatcgcgtccgagctgggcatgacggcccgggccgtcgagggcaggctctatcgcctgaaaaagcagctgcgcagaatgttgggaggtgagggccatgtgtgaccgcccgtgggagaccatgacggacgcggactttgaggccatgctggcccggagcgtccccgatgttccgccggaggagatcgtcgccgaggtgacaccgtggcggcgcgccatgaaccgcatcctctttggcatggcgctgtgcgcgatcaccctgaacttcctgtgcctgaactacatcctccccgccgtcggcacggtgctgctgctgctcggctttcgcgcgctgcggcgggaaaaccgctggctcggcggctgctttgccgtcaccgtgatccgcgcggcctgctttttcgccacgctgatcctgaatacgacgattttgcaaagtgccgtgttcacgcccgccgtcacgaccacgctcaccgtcataaacgcagtgctgctcctcgccctgtacttctgcttctggcgggggctgctggcggtgcagaaaaaggcgggcctgcccgcgcaggccggcggcgcgctcgcgctgatcgtgtggtacgcgctcgtgtgcgtcctcgccgccgtccactacacgggctggatcgtgccgatcgccatgctcgtgggctacgggtgcatcctccgcagcctttaccggctgtccggcgcactggacgaggccggatacgccatcgcgccggggccggtgcgggtgacggaccggtgcctcgtgctcgtgattgctgcggtgctgggcatcggctgcacgctcgggtatctcttcggcagcagctaccggatggactggcagcccgcggacacgtccaagcagacacagacggaagcgatccggcagcagctgctggatctcggctttccggaggctgtgctcaacgacctcacgccggaggacatcgccgcctgcgacggcgcgctgcgcgtcgtggtcgaaacggaagactatcccgtcaacgacggcagaaacgtgctgtgggaaacatacaacgagaaacatgagcgctattacgtgcaggacacggtctacgacgtcagggagctgcgcctgaccagtgtgggcgtgcagctgcccggcgcgcaggagacgtggcgggtgtaccaccacttcctgtggacgaccgaccccggcttctgcggcacggaggtgctccagatctggcctgccgatgaaaacatgcaggatggatggcgcttcgccggagacgtgaccggccgcgtgctgtatgaccgggacgggcagacgttcaccgcgtcctaccacacgctcggacgccagacctacaccgccgactccgtgttctttgggcagcggacgaacagcgacctgttcgcgcccttttccatgccgcggcacgcagagcacgcgcgcggctatgtcgcctac

SEQ ID NO: 13966 - DNA, 3488 bp, Unknown
  gut microbiota DNA sequence
ctacacccaccagcagagcctgctgcaatatcccgccgtgacggcgatggaaaagcggatgacgtccgccttcgggaataccggtgcgttttacaccgtacagcacgcgctgcagtttttccccgaggacgcacagacgctgcgatgagcgcaaaaaaaccgacccgaacgcttgttcgggtcggtttttctatgcaccgggtcaggggtgcggtttgttctcgcggtaggcggccatgatgtcgcggaagatctcgccgttggacggcggcgtccacgtgatagcgttggcgcctgctttgatggtctcgaggatgctctcatccgtcgggccgccggtcgcaatgatgggcacgtcggggtgctgctcgcggatgcggcgcacgacggcaggcgtctccgctgcggcggaaacgttgaagatgtccgcgccggcgcggatgcgctcgtcaaagtcggtgtccgcgcgcgcgaccgtgagcacgacggggatgtcgatcgtctcggccacgtgcgagacgacggtgctggccgtcggcgcgttgagcacgacgccggtcgcaccctgcatctcggcgaacatggcgaggttgaccacgcgctggccctgcgtgaggccgccaccgacgccggcaaacaccgggatatcggccgcgagcagcagcgcctgcgtgatgatcggctgcggcgtgaacgggtagaccgcgatgatagcgtccgcgttcacgtttttgatgatggacaggtcggtcgagaacacgagcgacttgatacgcttgccaaaaatcatgatgccgctgcactgatagatgacctccggcacgcgcagggcaaacttgcgcagcgtgccgtccacggcctgcggcatggactttttcggtgggattattttttcttcgtacattttgactcacactccagtatccgtttgaacgtctcgacgccggtcagcaaaacgcgctcgtcgaaattgaaatgactgctgtgcagcggggcggtaccggtcggctcctgcacgccgaggaagaaaaacaggcccgggatctcctgctggtattcggcgaaatcctccgccgccatgacgggctcgaccaggaccgcgtcgtccatggagtcgagcacggtgtaaaactgctccaccagctcgcgcgggttgcgcacgctggggtaacggaccttgcggtccatgtcgatctgcgcgccggtggccgtctcgagcccctgcatgagcgcggcgatcttgtggctgagggtgcggtagaggtcgttgctgaacacgcgcagcgtgccgctgatcgtgacctcctcggcgataacgttgtgcgatgtgccgccctggatcttgccgagcgtgagcagcgcgtcctggtgcggatcgacgtcgcgcgtgatgacggtctgcaccatcgtgatgagctccgccgcaacgacgatggcgtcgatgcccatctgcggcgtggaggcgtgggcgctcttgccgtggacggtgatctcgaaatcgctcgtctgcgccatgagatagtcccagcgcacgccgatcttgcccttcggcacggtcggccacaggtgcaggccgtagatgcggtcgaccttcgggttttcgagcgcgccgtcgtcgatcatgcgccgcgcgccggcccagccctcttcgccgggctggaacagcaggacaatattacaatgaatgtgcgcgcgatttttggcgatccagcgcgcaaagagcaaaaggatcgtcatatgcccgtcgtggccgcagccgtgcatgttgccggggtgctgcgagcagtagggcacgtcattggcctcgtcattgtggatgccgtccatatcggcgcggaaggcgatggtcgtctcggcgtccttagcgaaaaacacagccttcacaccgcagacggccggcgtctcgatgcggtccgggccgcactgcttcagctcgcgcaggacataggcctgcgtatcgcgcagctgaaagccgatctcgggaatgcggtgcaggtcctggcggatgcgcaccgcgtcgtcatacatggattcgatttgtttactcagatgcatactttctcccatggcgccgggtaagcccgcgccgcccgatctgtctatatttttctgcacacagtatacccaaaatccggccatgcgtcaatgggcacgggggcgggccgtgaccggtgtcaagaaaagttcacaacttgtcccttgcatttttccatacggtctgctagtattttagaaaatacttaaaaaattcgaagaaaacgaaggcgatctccatgtcatccaccaccgaagcgcgcgtggccgtcatcaccggcggcagttcgggcatcggcctgcacgccgcgcgtgccctgcgcggccgcggtctcaacgtgtatgagctcagccgccgcgccgaaaacgcggagccgggcgtaacgcacctgcaggcagacgtgacggacgaagcgcaggtgaacgccgccgtggcggagattctgcgccgcgaggggcgcatcgacattctcatcaacaatgcgggcttcggcatctccggcgcgatcgagttcacgccggcgcaggaggcccggcggcagtttgatgtgaactttttcggcatggtgaacatgaaccatgcagtcctgcccatcatgcggcagcagggcggcggccgcatcgtgaacatgagctccgttgccgcgccgatcgccattccgtttcaggcgtactactcggcctccaaggccgccgtgcgcacgtattcgctcgcgctcgcaagcgaggtgcgtcccttcggcatcgaggtctgcgtcatcatgccgggtgacattgccaccggcttcaccgccgcgcggcgcaagagctgcgacggcgacgatgtctatcacggccgcatcgcgcgctccgtcgccgtgatggagcacgacgagcagaccggtatgagcgccgaatacgccgggcagttcgtggcccggcgcgccacgcaaaagcgcgcgaagctcatctgcacgatgggacacaagtacgccctgttcgtgtttctcatgcgcatcctgccgaccgggcttgcgacccggatcgtcggcaagatctacgcatcctgatccaactgctttcttccctgcggcgcaaaatcccattgccaccatccaggcaacttccttccatccttctccaccctgtgcgccgcgtttccccccttcccgcagcagcgggtctgcctctggtcccatctcagccagaggcagtatttttatgctctgcataaaaatactgcccgatcccatccgaggcgggccttgccccctcgggctcccctgcggctctgtaaccataagattcagcgcgtctgtcgcgcctcggtggtctatttttttatttattttcttcgaaaataaataccgcccgatcccatccgaggcgggccttgccccctcgggctcctctgcggctctggtgccatgagacgcagtgcatctgtcgcgcctcggtggtctatttttttattt

SEQ ID NO: 13967 - DNA, 86662 bp, Unknown
  gut microbiota DNA sequence
gtaccatgagactcagtgcatctgtcgcgccccggtggtccgttcttttatctattttctccgaaaataaatactgcccgaccttataaaaaacctccacactgcgcaaacagtgcggaggtttttttataacattacgccagaaacggcgagcgcatataccgcttgcgcagaaagatgttgccgcccttcggcgggccgatctgcgtgaagccagccgactcgaacatggccagcgcgatgcggttggtgtgatacacgtgcgtgacgatctgctcgaacgactgcgcggccgccagttcctccacggcgcggagcatcgcattgccccagccgtggccgcggcaggccggatagacgaaaaagtcgttgatgaacaccgtctccggctcggtcgtgtcgcaccagagctcgccgacggtctcaccgccggactcggccgcgagcaggtagttgcgcggcgtttccgcgccctgcggcagcatctcgtcgagcgcgccctgcgcctcggtgagcgcgtgctcctctgtgtccgtggcgcgggcgaagagcagctcctgcgcgtagcgcgcgatattgcgctgccggaacggctcgaattcctccgccgtgagcacgcggagatctacactttgtcccatattgtcctcctgtttacgcctccggctggatcatgcgccgcgcgttgacaggcggcagcagatcgccgtacagatcccgcagcagcagctgcgccacgggcgtgatgtcctccgtgctctggcatgggcgcagatacagcgccgccggctgcccgccccagcggaagcggaagcccgtgtcgcggtagccgtttttcgtgagcagccgctcgcgctccggcagcgccacgcacgtgcggctctggcaatagagaatgcccttcttaccggcgtagcagcgcgcgatgagttccatggccacgcggccgagcagctgcccgcgcagatacggatagatcgtgagcgcgtgcacgagcacgtagccatacggcgagcagaccgtcacgagcgcatagcccgcctcgcgcctgtcgtccgcgcggaagagcagcagctccatgcgccggcgcaccatggcgctggcgatgacggcttccggcagcagctcgggcgcgtcaaacgtgcgcttcatgtccggatacaggcgcacgaggtccgtgagcctgcccttttccagatgcagcttgcggatcggcggcagctgctgcagcagctcctcgagaccaaacagctgctcgtccggctcccagttgccggccgtgtcctgcaccggagcctgtgcccgcggtgaaaaatggacgatcttcggttcgttcggctctgtcatgcaaacttctccctttccgcgacggccagcgcgtcgcagcggttgttgtacacattgtcggcgtgacccttgacccagaaaaactgcaccttgtgcgtctggagcagcccgtcgagcgtctgccagaggtcgacgtttttcagctcgccgtccttgcggcgccagcccttctgcttccagccgcgcagccagccgaggttaatggcgttggcgagatactggctgtccgtatacagcgacacctgacacggctcgtgcaggctctgcagcgccgtgatcgcgccgagcagctccatgcggttgttcgtcgtggacggctcgccgccggagagctccttttcatgcgcgccgtatttcaggatggcgccccagccgccggggccggggttgccggagcaggccccgtcggtatagatcgtgacctgcttcatgcctcgggctcctcggcgggggcagcgtcgccgctctcggcgcggtcggtgagcgcgacagagatgacgcgcgcgccctcggacaggcgcatgatgcgcacgccctgcgtcgcgcggccaagctcggagatgccggcagcctccatgcggatgatgacgccgtcgtccgagacgacgagcacgtcgtcgctctcctgcacgaccttgacggccgcgaccgggccggtcttgtcggtgatgttgtagtttttcatgccggagccgccgcggtgctgcggttcctcgccgccgcggatatagtcggcggccggggtgcgcttgccgtaaccgttttcggtgatggacagcacgtccgcgtccggctgcgcgatctcagcgccgacgacccagtcgccgtccttgaggcggataccgcgcacgccgacggcctcgcggcccatggggcgcacgtccgtctcggcaaagcagatggcctgaccgttgtgggtcgccaggaggatgttccggctgccgtcggtgcgcatgacgttgatgagctcgtcgccctcgtcgagcgtgagtgcgcggatgccgctcgtgcggatgttgcgcagggccgagagcggcatgcgcttgaccgtaccgctgcgcgtggcaaagacgaggaacgaatcgtcgtccatctcgcgcacgtgcagcatggcgttgacatgctcgtccttctccacctggatgaagttgacgatgttcacgccgcgcgcggtgcgcccggcctccgggatgaggtagcccttcttgcggtagcaccggccgcggttggtaaagaagaggatgtagtcatgcgtcgaggcggtgaacacggtgtccacatagtcctcgtcgcgcagcgtcgccgcgcgcacgcccttgccgccgcgcttttgcgcggtgtactcgtcgacgggcacgcgcttgatgttgccgccgtgcgagagcgtgaatacgcactgctcctcctcgatgaggtcttcgatatcaatgtcgtcctcgatgtcctggatctccgttttgcgctcgtcgccgtacttgtcgcggatggcaatgagctcgtcgcgcagcacggccttgaccttttcggggtcggccagcagctcgcggaagtaggcgatacgcttttccagctcatcatactcgttttgcagcttctcgcgctcgagcccctgcagggccttgaggcgcatatcgagaatggcctgcgcctgcacatcggacaggctgaagcgctgcataaggttttccttcgcgtcgtcatagctctcgcggatgatgcggatgacctcgtcgatgttctcctcggcgatgagcagaccctcgagcagatgcgcgcgctcaagcgcttttttgaggtcgaacttcgtgcggcgcacgatgatctcttcctggaaggtgagatactcgtcgagaatgtgccgcagggacaggatcttcggctgcgactggttatcgaccagcgcgagcatgttcacggcgaacgtggtctgcatctgcgtctgggcgaagagccggttgagcacgacctgggtgttggcgtcctttttgagctcgatgacgatgcgcatgccgttgcggtcggactcgtcgcgcaggccggagatgccgtcgagctttttatcgcgcacctgctcggaaatgttctggatgagctggcgcttgttgacctgatagggcagctccgtcacgatgatgcggatgcggtcgtgaccccaggtctcggtctcggtgcgggcgcgcacgacgatgcggccgcggccggtggcgtaggccgcgcggatgccgctgcggccgacgatgatgccccgggtcggaaagtccgggcccgtgacgtgctgcatgaggtccgagagcgtggcgtccgggttttcaagcacgcagacgcaggcgttgatgacctcggtcaggttgtgcggcgggatattcgtcgccatgccgacggcgatgccggagctgccgttaacgagcaggttcgggaaccggcacgggagcacgcgcggctcgcggcgcgtctcgtcaaagttcgggtcccagtcgacggtgtccttgtcgatgtcgcgcagcatttcgttggcgatcttcgacaggcgcgcctcggtgtatcggtaggcggccgggggatcgccgtccacggagccgaagttgccgtggccgtcgacgagcatgtagcgcatggaaaagtcctgcgccagacgcaccatcgcgtcgtacacggacgcatcaccgtggggatgataccggccgagcacgtcgccgacgcaggtggcggattttttgaacggcttatccgaggtcagattgtcctcatacatggcgtagaggatgcggcggtgcacgggcttgagaccgtcgcgcacatccggcagcgcacgcccgacgatgacggacatggcgtactcgatgtaagaggtctgcatctcatggacgagctcgctctgaatgatcttctggtcgggatagagaatgtcctcccgtttataatccttggccatggctgcacacctccttaaatatcaatattgaccgcgtacttggcgttttgctcgatgaacgccttgcgcggctcgaccttttcgcccatgagcacggtgaacacctcgtcggcgtgcacggcgtcctcgagcgtgatctgcttgagcgtgcgggtctcggggttcatggtcgtctcccagagctcgtgcgggtccatctcgccgaggcccttgaagcggttgatgtcgatcttcgcgttcgggttgtcgccgcgcatctcggcggaaattttatcgcgctcctcgtcggagaaggccacgcgcgtggtcttaccgcggttgagcttatacagcggcgggatggcggagtagacatagccgccgtcgatgagcggacgcatgaagcggaagaagaacgtcagcagcagcgtgcggatgtggctgccatcgacatcggcatcggccatgatgatgaccttgtgatagcggagcttattgatgtcaaactcatcgcccagtccggcgccgagcgccgtgatgacgggcgtgagcttgtcgttgccgtataccttgtcggcgcgggccttttcgacgttgagcatcttgccccagagcggcagaatggcctggaagcgcgagtcgcgcccctgcgtggccgagccgcctgcgctgtcgccctcgacgatgtagagttcggtgagcgacgggtcgcggtcgttgcagtcgcgcagcttgtcgggcatgttgaagccctcgagcccgtttttgcggcggatgttttcgcgcgcgcggcgcgcggcttcgcgggcgcgcgaggccgtgagcgctttttcgatgatcatgcggccgacggcggggttctcctccagaaactgcgacaggcgatcgaacacaacggaatcgacgagcgtgcgcatctcagagttgccgagcttggccttcgtctgcccctcgaactgggggttcgtgagcttgacggagatgacagccgtgaggccctcgcggctgtcctcgccggagatgctgtcgccctccttgaggatgccggactttttgccgtaggcattgagcgcgcgggtgagcgcagccttgaagccggtctcgtgcatgccgccctccggcgtgtggatgttgttggcgaacgacacgatgacctcgttatagccgtcgttatactgcagcgcgatctcgcacatggagtcgctgcgctcgccggacatatagatggcctcggggtgcagggccgtcttgtttttgttgatgaaatccacgaactcgcggatgccgccctcgtagcacatcgactcgctcacgggctcttcgccgcgccggtcggtgatggtgatgcgcagtccggcgttcagaaacgcctgctcgcgcatgcgcacgtgcagcgtctcatagtcgtagaccgtgtcctcgaacatgatgggatcgggcttgaagcgcacggtcgtgccggtgtgatccgtctcgccgacaacggtcatgggctgcgtgatatcgccgcgggagaacttcatctgatagatcttcccatttttgtgcacgttcacttccagccactcggacagtgcattgacgaccgaggcgccgacgccgtgcaggccgccggagaccttatagcccccgccgccgaacttgccgcccgcgtgcagcacggtgaacaccacttcgagcgcggatttgccggtctgcggctggatgtccacggggatgccgcggccgttatcgctgacgcatatgatgtcgccgggctcgatggtgagctcgatgtggctgcagtagccagcgagggcctcgtcgatggagttgtcgacgatctcatacaccaggtggtgcaggccggacgacgacgtcgagccgatgtacatgcccgggcgtttgcgcacggcctccagaccctcgaggacctggatttggctggcgtcgtactcctgtgtgatcttatctgtaatatctggcatggtttgcttccttccgtgcagcgccgcgatcagagattttccagtccgctggccttgctgcgtttatataatgttgcggtgttgagctgggagagataacatgtctggccgctgccgagcgagcagagcacgaacgacttcggcagctcggtcccggcggcgttttccacctgaccggcctgttcgagtttttcgagtgtctcgcgcgtgcggtacgaccacgtggcggtgtccatgtcaaagacgccgatgacgctcttttgcagcgcaatgacctgattgccgaggtgcagatacatcagcgaatcaccccgttttcgaccgtgagcacgcgaccgccggtacgttcggcgatgcgcgcgtcctcgcagcaggtgatgagcgtctgcccgccgccgatgcggttgagcacgaaggcctgccgctgcgcgtccagctccgagagcacgtcgtcgagcatgagcacggggtattcgtcaaactcgtcgtgaaagatctcccgctcggcgagcttgagcgacagcgccgccgtgcgcgtctgcccctgcgaagcgaacgcgcgcgccgactggccgttgatgctgatgatgaggtcatccttgtgcgcgccggtcaggcactggccgctgtcgagctctgcgcggcggtgctgctcctgatggtcgcacagggcgtagtaaatttctttttctgtgccgagcgcatcgacaacagtgctgaccgtgcggtaggcgagggtcaatttgtcgcgcccgccggaaaaatcggcgtggatgggcgcggcggcgatgttcagccgcgaggcgtaagccgcgcggtagcggatgagcttggccgagacgcggcacatctggtcggaaaaatcgtcgagcgtgtcgagcagggacggtttttcatgccagtcgcgcaggatggcggacttctggtcatataaccggctgtattcagcgagcagtgcgccgtacttcggccgcagctggctgatggccatgtccatcatgcggcggcgggcggccggcccgtcgcggatgatgttcagatcatccggacaaaagagcacggcggcaaacgtcccggcgagctcggcggcggttttcttcacgccgttttgccagatctgcttgcgctgcccctgccggagcacgatgcgcacggtctgctcccgcccgaaggcgaacacatccgcgagcacctccgcgctcgtatagccgaagccgatgagttccttatcgaaccgcgtgcgaaagctcttcccgcccgtgagcaggtagaccgcctcgagcagattcgtcttgccctgggcattttcgccggtgatgacgttcgttccgggcgaaaactccgccgcggcaaattcgtagttgcgccagccgttgagcgcaatttttcttacgatcattgcgcgctctgcacgtgcagcgtgtgcccggcgaaggtgacttcatctcccgggcggatcttcttgccgcgcatggtgcacgtctcgccgttgacggcgaccataccgtcggcaatgacctgcttggcctcgccgccggtcgccgtgagggcggcaaacttcagcagcgcgtcgagcttgataaattccgtttcaatcgtaatgttttccatttttcccgtttttcagacccggatcactgtccggcgcgcaggcgcaccggcaggaccatatacacaaagttatcacttccgtcagccgggacgagaatgcacgggctcgaaccggtgttcaggcagacgttgatctcttccgcgggcgcggccttgagcgcgtcggacaggtagtgatcgttgaaaccgatctccagatcgccgccgtcgccctcgcacgggcaggagtcggccgccttgccgagcggcgtcgtgcagacgaagtcgatcgcgtccttgcggaaggtcaggcgcagaggcgcgttatttttgctgtcaatgatgagcgacacacgctcgacgacctcgagcagatccgtgcgcgcggtcttgaccgtgacgcggaacgactccgggattgctttcttataattgaggaagtcgccttccagccggcgggacaaaatgaccgtattgccgacggtgaaggaaatgtgcttgctgccgacggacaggacgacgcgctcgtcgctgtcgccgcacaggcgctccagatcgctcagcgccgtgccgggcacgatgaagctgcagtcatcgccatagccctcgaccgcttcgcgccgcagcgccaaccggtagccatcgacggagaccatggtcagaacgttattttcgatctcgaagagcgtgcccatgtagaccgggcggctctcgttcgtgctcacggcgaaggagcactcgttgatcatctttttgagcaggtcctgcggcagcgacacgccgttttccgcctcgacagtcggcagatccggataatcgtccgcgctcaggccgacgaggttgaacgccgccttgccgcatttgacggacacggttccgttttccgcctcgacggtgacgatgccgtccggcatgcggcgcagcatctcgcagaacaggcgcgcaccgatgagcacgctgccgggctcgggaatgtcggcgtcgatggtggtataaatggctttcttcaggtcatagccggtgatacgcacgctcgcgccggcctcaatgagcaggccttcgagcgtggggatcgggcttttggcggctgcggcgcgggctgcggatgcggcagcctgctgcagaacgtatttgtcacaggaaaatttcatggtcggcctccttgatcagaattgctgtgtctatccgaaagatagaaagcataaatttagtagtagtagtagtaggggtgttcgtttggtggaaaacccgccgaatgccttgtgtcagcgggaaaaaccgtgttgaaaagattgtggaaaggttggtaacttaaaaactgacgaaaattgacattttcagaatccaccgctttccacacgctttccacgttagaataacagccgaatgtggaaatcagtttttcgagttgatgttgctcgtaatgtcgcgcacggtggcggcgatctcggggtcggacttgagcagctcctcgaccttgcggatggagctgagcacggtggcgtggttgcggccgccgaattcctcgccgatctccttgagcgggaggttcgtgaggttgcgcatgaggtacatggcgatctggcgggccatggcggtctttttgctgcggctctgcccgcgcaggtcggcgccggtgagctggaacgagcgcgcggactcttcaataatgacatccggcgtggggatataggtgccggtgcggatgacgtcccggatggcgcgcttgacggaatcgaccgtgatcgtatcgtcgagaatgtcgcggtaagcggtcaggcgcttgacgacgccctcgagctgacggacgttcgaggtgatgttttccgcaatgtactggacgacgtcctcggagagaatcataccgaactgcgcggccttcgtgcggatgatggccgtgcgcgtctcgagatccggcggctgaacgtccgcgagcagaccgccctcgagccgggtgcacaaccggtcgtcgaggcgcttcatctccttcggcggccggtcggaggtcacgacgatctgcttgccggcctcatacagacagttgaaggtgtggaaaaattcctcctgcgtgctgtccttgcccgcgatgaactggatatcgtccatgagcagcagatccgcgttgcggtatttctggcggaagttttcggccgtgccggtgccgatggatttgaccatctgattgacgaactcctcgcccttgacgtaggcgatcttcgccgacggattgttgtggcggatggtctggccgatggcgagcagaaggtgcgtcttgccgaggccggagttgccgtagatcagcagggggttatacgccttgccgggattctgcgacacggcgatggccgctgcgtgggcaaacttgttgctcgggccgacgatgaagcggtcaaacgtgtagccgtccatctccggcatttcctcggacgacgggcgcttctcgcggtattcgagcagctcatcatccccggcgagcacgaccagctcgaacgggcaggaaaacagatcgtacagcacggcgcagatcgtcttttcaaagcgcgactgaatgatgctgcgcttaaaatccgacgtggtgtgcacgatgagcgtattattattgatctcaatgggggtgcaatcggaaaaccaggtattgattgccgtctgggtcagctcctgcgagaggctgtccatgacgacggaccagatatcggtgagcgaattcatggtggccataggttcggctccttcgatgatttttccctgcgcgggtgcgctggtatcagccctaccagtatagcaaaaattcatgattatttcaataataatgttcggatttattatataaataggtgtagaatctgccgtgcagaggatttgcttttcctgtgcaggttgtggtatgataaaaaaacacgattttttacataaagcaggtgttgttttgttcctggtcgcgcaggccgaacaactgttcggcgatacggaagcagccgccctcccggccttgttggagagcgggcggcttcctgcgcgcatttcgggtctgccggcgagtgcgcgcgcgctgctggcggcgtcgatgcacgcgcagctcgacgcgccggtgctggccgtgtgcccggacgaggcggcggccgagctgtttcaaaaagatctctctgccctgctggggcaggacgtgccgctgctgacggcgcgcgactatacgttttatacggtcgagagcgtctcgcgtcagacggagcaaaagcgcctgagcgcgctttatgcgctcgctgccgggacggcgccggccgtggtgtgcacggtttcgggtctgctgcagcgtgccatgccgaaggaaaaactgctgcaggcggcctttgagatccgcgacggcagttccctgccgcccgaggatgccgaggatgcgctgctgcgctgcggctatctgcgtacggcgcaggtggaagggccgggccagttttcgcgccgcggcggcattctggactttttctcccccgcgtatccgcagccggtgcgcgtggagttctggggcgacgatgtggactccatgggctttttcgaccccgagagtcagcggcgcactcagccgctggaaagctgccgcatcctgccggcggcggagaccctgccgccgctgtatccgggcggcagcgccgcactgggcgaaaagctgcagaagctcgccggacgcgccgccgcgaaaaaggacagcgacacggcgcagaagctcgccgaggccctgcgcgccgacggggaaaagctctgcgccgactgcgtgctcccggcggccgaccggtatatgggcttcgtgtacgacacgtttgccacggcgctggactatctcgcgccggaggcggccgtgctgatcgaccagccggcgcgctgcgccgagcgcgcgaaggaatacaccacgcagctgcgcgaggacatcgccctgctcgtgcgcagcggcacgatggccgcgcgcgcggaaaatttctacgagccgtttgccgacatgatgcgcagagtccaggcctggcccatcgtgctggccgacgggctgcagctcggccgcagccccatcgaggcgcgcacgctcgtgagcctgacggcaaagcagctcccgtcctacggcggcagcagccagaccgcggcggacgacattgcgcactatcggaatctcggctaccgcgtggtcgtgctggcgggcgatatgcgccgggcgcgcattttgtgcgagtttctcgacggtcacggcatccatgccgcggcggacgagcacccggatgcgctgccggaaccggggcagtgcctcgtcacgccgggcagtctctcggcgggcatcgagtttccgtatgcaaggctcgccatcctcacggacacgcagatcgcggcgtccggcctgtggcgcgccagacacaaaaagcaaacgaaccgcgagaagatcaactcctacacggacctctccgttggcgacctcgtcgtgcacgaataccacggcatcggccgctttgcgggcatcgtgcagatgccggtcgacggtgcggtgaaggactatatcaagatcagctatgccggggcggacacgctctatgtcccggcgacacagctcgacctcgtgagcaaatacatcggcgcgggcgaggaccggcccgtgaagctgtccaaaatgggcggcacggagtgggcgcgcacgaaaacgcgcgccaaagcggccgcaaaaagcatggccaaggagctcaccgcgctctacgccgcgcgcagccgcacgaagggtcacgccttcgcacccgacagcccgtggcagacggaatttgaggagcacttcggctatccggagacggacgaccagctccggtgcatcgacgagatcaaggccgacatggaaaagcccgtgcccatggaccgcctcctgtgcggcgacgtgggctacggcaagaccgaggtcgccctgcgcgcggtgatgaagtgcgtgctcgacgggcggcaggcggccattctcgtgccgacgaccgtactcgcccagcagcactatcagacggccgtgcagcggttttacggcttcccggtcgagatccggatgctctcgcgcttttgctcgcaggggcagatccgccagacgctcgcggacatgcgcagcggcaagtgtgatctcgtgatcggcacgcataagctgctgcagaaaaacatcgaattcaagaacctcggcctgctcatcgtcgacgaggagcagcgcttcggcgtggcgcacaaggagcacatcaaggagatgagccgcgcggtcgacgtgctcacgctctcggccacacccatcccgcgcacgctgaatatggccctgtccggcatccgcgacatgtccaccatcgaagagccgccgcaggaccgcatccccgtgcagaccttcgtcatggagcacgactggaacgtgctgtgcgacgccatgcgccgcgagctgcagcgcggcgggcaggtgtactacctgcacaaccgcattgaaaacatcgagcgcaccgccctgcgcatctcgaagatgctcgacggcgcggccgtggacgtggcgcacggccagatgaacgaagagcagctctcgacggtcatggagcgcatggtcacgggcgagacgcagatcctggtttgcacgaccatcatcgagaccggcatcgatattccgaacgtgaacaccctcatcatcgaggacgccgaccgcatgggccttgcccagctgcaccagctgcgcgggcgcgtgggccgctcgaaccggcgcgcgagcgcgtacctgacgttccggcgcgggcgcgagctgagcgagatcgccgaaaagcgcctgagcgccatccgcgagtttgcggagttcaactccggcttccgcatcgccatgcgcgatctggagatccgcggcgcgggcagtctgctcggggccgagcagtcgggccatatgatcgacgtcggttatgatatgtacctcaagctgctcgaggaggccgtgctcgaagagcgcggcgaaaagcccgagcagcgcgccgagtgcgcggccgacctcgccgtgtcggccaacatcccggagagctatgtgcccagccaggagcagcgcatggatctctaccgccgcatcgcgctcgtgcgcacggaggcggaggccgacgacctcatggacgaggtcatcgaccgctttggcgacccgccgccgagcgtgtacacgctcgtacaggtggcgctgctgcgtgccgacgcgggcaaggtcggcgtgacggacatttcgcagaaaaacggctgtttgaagtttctgctggcgcagttcgatatgcagaaggtatcggcactgtacgcccggccggagttcaagggccgcttgaaggtggatgcgggggcaaagccgggcgtcattctgcgcctcaagacccgcacccacgtcatcgaacaggcaagagcgtttgtttccgcatgggcagacgcccagggagaccgcgcatgacacccatgtgcaacgaaacgaaaggaagcgtttgctgatgaaaaccagaatcaccgccctgctgctggcgctcgtgatggccgtctgctgcctgaccggctgcacctcgacccgcgtgcgcagctactcggaagagagcagcgatgcatcgaccgacaagtatgctgccgcactcgatgcttacaagagcaacaaaaaggtcatgaccatcaacggcagccccgtgtactggaacgagtacgcctatttcctgtgcgccatcatggcgaacatggagcgctacggcatgcagatcacggactggagcgatgtctacgacgagagcacgggcgagacgtacagcgacatcatgaccaagagcgtcgtcaacaacatcgcctggaaccacctcatcgaggtcaaggcggcggaaaacgacgtggcgtttgacgcggcgggcgagcagtacgtgcaggacacgatcgaccagaccattcaaaacgtcgtgggcgacgacggcaccgaggccgagctgaacgaaaagctccagtcgtactacatggatctggatctgttcaagtatttcaccaagacgcagtatctctataacggcctggccagcaagttcttcggcgagaacggcgcgaacatctccaacgaggacgtgcaggaatacgttgatgccaacgactacatgacggcaaagcacatcctcttcaagacgacggacgacagcggcactgccctctcggacgacgaaaaggccgccaagaagcagcaggccgagcaggtcgcggcgcaggtcaaggctgtgaccgatcccgaaaagcgcgtggagctgtttgaccagctcatggagcagtacaacgaggacaccggcgagagcaactacccgcacggctactgcttcacctccggcacgatggtcacggagtttgaggacgcctgcaaggcgctcgatacctacgaagtgtccggcgtggtggagagcaagcacggctatcacgtcatcctgcgcatgccgacgcagggtgacgacctggtcatgagcagcgacggcagccagcagacgctgcggatgctcgtggcgcaggagcagctcggcagcctgctgacgggctgggtcgacgaggcggacatcagctgggagccgaagttcagcagcatcgactatgcggccgtgttcacgccgaaggagagcttctggaagcggctggacgtgttcgactggttcgagaagtaaaagcagcataaaaagatcccgtcatccgacccggatgacgggatctttcttcttttcgttcaggcgcgcttgatcatgccggcgatctttttcatgagaccggagccgagcttttcatcaaagtagttgagccaggcgcgcacggtgtcgatcgtctcgggatcgccgagccagtggcgcaggatgatattgcggtcggtgctgcgcaggagcttggccaccgacacgaggatggcgtaggcatcgtcgatcttgccgagcagcgggaaggagtccggcacgaggtccagcggcgagaggacatacagcagcgcgaagccgaggtcgagcttgcggctcgagggcacgtcggggtcgagcatgagcttgcagatcaggtaggcaaagtccggcagcgtcgtgagataatcggccgccttgctgccgagttttccggccacaaagctgttggcctgatagcgggcgcgcttatagaaacggtcgaatgcgttgtcgtccatgtaatagatgttttctttggtcatgatcctgcctcctgatgggagatgatttctttctattatagcgaaaaaccggccgggcttcaaccggtttgtgaaatttttcggaattcattgccaagcgggccgatccggcgtataatgcaggagcatttcaggaaacggaggctgagcctatgatccgctttttcaacggccgcacgctcacaatggcggacggcgtgtccgtcacgacggacgaggtctggaccgacggggacaagatcgcctacatcggccccacgccggagacgctgcccgcgttcgagcggcagatcgacctcggcggcgaccttgtcatgccgggctttaagaacgcgcacgcgcacgccggcatgagctttgtgcgctcgtatgccgacgatgtgccgctgcagccgtggctgttcgagcagatcttcccgctcgaggccaagctcacgcctgaggcggtgtatgcgtttaccaagctgtccatcctcgagtatctcacgagcggcatcacggccggctttgacatgtactatttccgcgaggccatcgcccaggcgagcatcgactgcggcttccgcacggtgctgtgcgggggcggcggcagcgcgcagcagctcgagagcgagtaccgcaaattcaacgccctgcacccgctgatctcctatcagctcggcctgcactcggagtatacctcgaacctcaccgagatgaccgaggccggcgagctggcccgcgcgctgcacgcgccggtgttcgcgcacaatgccgagaccgcgcgcgaggtggccgagtgccgcggccgctggggcaagacgccgacggagctgtttgattccctcggccactttgattacggcggcggcggcttccactgcgtgcacatgacggagcacgatctggagatcttccgggaccgcgggctctgggccgtcacgaaccccggctcgaacgccaagctcgccagcggcatcgccccgctcaagcagatgcgggagctgggcatccatatggccatcggcaccgacggcccgtcgagcaacaacgcgctcgatttcttccgcgagatgtatctggccgccgtgctgcaaaagctgcgctgcggcgacgcggccgccctcccggcggacgacgtgctgtatatggcgacggtcggcggcgcgcaggccatgggcctgaccgactgcgacgtgctcgcccccggcaagcaggcggacctgatcgtcatcgacctgcagcggccgaacatgcagccagtgcacaacgcggcgcgcaacctcgtctacagcggctcgaaggagaatgtgcgcctgacgatggtcgccgggcgcgtgctgtatgaaaacggcgcgtttttcgtcggcgagccggcgcaggacatttaccgcgccgtggacgcggcctttgccgccatgcgcgccaggctctgatcgctttttctgcgggctgcggggcggcacacgccgcctgaggtgatatgcccgaaacgataaaaaattccggaaacatcatgtttccggaattttttatgccctgcaggctttatgctttcgtttcgagcactttcacgccgtgcatgatgatctcgccggcaagcacggccatctcttcgggcgtctgcttcatgccgttgtcgatccacgtgagcgcgagcgacatattgcccgacacgatgaacgagcagaagtagtcgagcatctcggggtcgttcggatagtaatacgcgaggaagtcatacaggaattcgtcgcgcaggatgtggcagatgcggtcggtaaaggcaatgtcgccgtttttgccgagcagcacgtgacacagatccgaattttgctggatgaactggtacagctccatcaggtacgggtaggtcttgccctcggagtctttcgcattgtgccggcggcagacgaccgtcagcccgtccgccagctcgtcctcgaggctggacagcaggtcgtacacatccttatagtgaatatagaaggtgccgcggttgatgtctgcaatcgcggccagttcgcgcacggaaatgtccttgacgcttttttccgccatgagcttcatcagagcaagccgaagctgccgtttcgtctttcgcactctgcggtctacaactttttcttccattcgccgattcctcctacctgttttttgttatcttgacatacatgataccaccaaaacgaacaataatcaacatttcgttgcataaaaattgtgatttttttcgaaattttcgtgaaaatcttcgggaaaagcagacggtgtggtgcatcatcacctttttgctgcccatctggtctgcggatcggcgaccagatgggcgccggaaaacgcagtggcaaaatggcgcgcgatatgctatgatgggggcaaatcccgaaaaggagtacaagaccatgtttgaaaacggaacgttcgcggtcctcggcccggacggaaaacaggtgcagtgcgacgtgctgttcacctatgactgtgaggacaacggccgctcgtacgttgtgttcacgaccggcgaaggcgcgcagcagcggctgttcgccaaccgttacgacacgcgcgacgatggccagcttgccctgctcgcgctcgaaaacgagcaggaatacgccatcatcaagcactgcttcgaggagctcaaggcaaagctcgccgagcaggccgcggagaccgccgcacaggagggtgaacccaaagcatgacagatccctttcatccgctgagcgtgcgggacatcccgctgctcacacgttattttgcccaacaggatacgcgcctgtgcaatgcctcggccggcgcggccgtgctctggcagccgtactttcaggacgcagcgctcgaggtggacggcacgctgctgctgcgcgagcagtttcccggcctcggcacggtgttttccacaccgatcggcgagaatgtgggaaacgcttacgattttctcgtgaaatattgccgcgcggtggggcagccggtgcagtttttccccgccacggcggccgatgtggaaaatctgcgtgcgcgcttcggcgacgtggaggtcacgccggtgcgcgactggttcgactatctctacgacgcgcaggacatggtgacgttccgcggccggcgcttcaacggccagcgcaaccacatccaccactttcagcgcctgtacccggactgggcgttcgagcgcgtcacggaggagaacctgccggaggtgtgcgcgttttttgacgacttcacccgccgctaccataaggacagcgacagtgcgcaggcggaagagggctgcgtgcgggagttcctgcgcgattttgccgcctacgccccgctcgcgggactgctgcgcgtgaatgggcgcgtggccggtttttccgccggggagatcgtgggcgacacgctcatcatccacattgaaaaggcggacattgcctacgagggcatctatcaggtgctggtcaacgaatatgccaagtgcttcgtcacgcccgacgtgcgctacatcaaccgcgaggaagacgtgggcgacgaggggatacggcgctcgaaggaatcgtatcaccccgtgcgcctgctcgaaaaatatctggtacgcattccggcacagccggagaaaggagaaacgatcatgcaggaagtctatgaatttctgaaaaagtgcggcacgtattatctcgccaccgtcgatggcgaccagccgcgcgtgcgcccgttcggcacggtgaatctgttcgagggcaagctctatatccagaccggtaaggtcaaggccgtctcgaaggagatggcggccaatcccaaggtggagctgtgcgcgtttgacggcgagacctggctgcgcgtgagcgcgacggccgtggaggacgaccgcgtggcggcgcggcaggatatgctcgaccattatcccgagctgcagagcatgtacgccgccgacgacggcaacacgcaggtgctcgcgctgacggacgcgaccgcgacgttcagctccttcgccgccgcaccgcgcacggtgcgctggtaagcgccgaaaagagcaaaaaacggcccgccggccccggcgcggtggaggtgttcttcttcggcgacgagcgcgcgccggagtgagcgcggcagaaacaaaaaacaggagaccgcccgcgatccgaaacggatcggggcggtctcctgcttgcatgcaaagcagaaagactgatattagccgatcaggccctgaatgtagttcaccggccactggcagaagtccttgaccaggtagagcttatcgcggatggcgaaagcggtgttctcgtcacagagcgactcgagctttttcttgatggccttggtgttcacctcgagcagcccgctggcgctcgacaggatcttgccgccgtcgatctccttgatcgaggtccagagctcggaagcgtactccttgacgccaacgctcttaattgcctgaatgcacatacctattcctcccttaaaatactggtgctcccggccgctcgactgcggccggaaaacaagattgctcttatcaacagtgctctcattctagcacaaagccgtggaattgtcaaagaagaatacagagaaatgtgtaatttcccacattttgtggtcaatgtgcacaaaccggacaacaggtagcagaaaatctgcccagaaccggtgaatggactatgcgggcgcttacgcctcggcgatgacctcgcactcgacgagcacgtccttgggcaggcgcgcgacctcaacgcagcttctggccgggaacggctcggagaaatactcggcataaatggcgttgacggtggcgaaatcgtccatgttcttgatgaacaccgtcgtcttgacggccttggacatgtcgctgccggccgcctgcagcacggcgctcagattgcggaagacctggtgggcctgcgcgtcgatgccgtcggcgatgacgccggtagcggggtcgatgccgatctggccggacgtgaacacaaagccgccggagacctgcgcctgagcgtaggggccgagcgcggcgggggcgtgattggtagcaactgttttcatgatgatgacctcctgttagtcgatttttacgtgataaccgttttgaatgagctggtcgagcacgcggtcgccgtgctctttgccgccgacttcgcacgagacgtgcacgtcgatctcgttggggttgagcccggcggtgagccggtcatgctccacggagaggatgttcgcgccgagcgcggcaatgtcgttgagcagcttgccgagactgcccggccggtcgagcagcgtgaccgtgaagcgcagccggcggtggcgggacacgaggccctgctcgatgatgcactggatgaagctcacgtcgatgttgccgccggagagcaggcacacgacgtttttgcccttcacatcgaccttgcccttgagcacggcggccacgggcgcggcgccggagggctcgacgatctgcttgcagcgctccatgagcaggagcaccgcctcggagatctcgagatcgttgacggtgacgacgtcgtcggcgtatttctggatgagcgggacggtgatgtcgcccggcgccttgacggcgatgccgtcggcgatggtggccacggagtcggtctggacatagctgtgcgaatggaacgactgcgcgatcgcgttcgcgccctcggcctgcacgccgatgacctgcacgcgggggttgatctgcttaatgcacgcggccacgccggcaagcaggccgccgccgccggccggcacgatgacgatgtccgccgtgggcagatcgccgaggatctcgaggccgagcgtgccctgaccggcaatgacctcggggtcattgtaggggtgcaggaacgtggcgtgctcctgctcgcagatctcgcaggctttggcgtaggcatcgtcatagcagtcgcccgcgagcacaacggtggcaccgtagccctccgtggccttcgccttggcgatgggtgcggtcttgggcatgacgatcgtggccgggatgccgaagcggtgcgcggcgtaggccacgccctgcgcatggttgccggccgatgaggccacgacggcaccggtctcgccgcgctcgacgagcgccgcgatcttgttgctcgcgccgcggatcttgaacgagcctgtcttctggctgttttcgtacttgagataaatgttgccgcccgtcatggctgagaacgtggccgacaggtccagctccgtgtggtgcagcacgcccttgagccgctgtgccgcgcgttcaaattcctgcagtgggatctccacagcaaacacccccgtaaaaatatctgtttgggtctttctgtccctactataccgcgggaaggccggaaatacaagcgccgcaatgcaaaatgtccgcgccaaaaaaacttttttgcgagatcgtccgcgggataaaaacattcgcgcgcgggcagcgcacggggcgcaaagcaaatcttacatatttcttaaaaagtgagaaatcggttgccgccgcacactgcgcgagggtataatgcacgagaaaatgggaaagcagcgccggtgcgcaccggcgcgatcatcaggaggagacatcatgctcaacattcagcattttaccaagacctacggcgagaaaagggccgtcgatgatctgagcctgcacatcgcgccgggcgagatctacggcttcatcggccacaacggcgccggcaagacgacgacgctcaaggcggccgtcggcatcctgcagtttgacgcgggcgagatcacgatcggcgggcactccatccaaaccgagccgctggcctgcaagcggctgctcgcctacatcccggacaatccggatctgtacgatttcatgagcggcatccagtacctgaactttattgccgacgttttcggcatcccggccgcggaacgctgggcgcgcatcgagccgtatgccgacgcattcgagctcacgggcgatctcggtcagccgatcagcgcgtactcgcacggcatgaagcagaagctcgccatcatcgcggcgtggatccacgacccgaagctcatcatcatggacgaaccgttcgtcggcctcgacccgaaggcggcgcacctgctcaagggcatgatgcgcgagctgtgcgacgtcggcggcgcgatcttcttctcgacgcacgtgctcgaggtcgccgaaaagctctgcgacaaggtggccatcatcaagggcgggcggctcatccgctccggcacgatggaggaggtcaagggcgacgacagtctcgaggacgtgttcctggagctggaggatgcatcatgctgaaaacgcttctgaaaaaacagatggcggagatcttccgcaactatttctacgacccgaaaaagaacaaaatgcgctccaggggcgcgacgatcgcctacatggcgctctacgcgctgctgatggtgggcctcctcggtgggatattcgcgctcatggccgtgggcctgtgcggccccctggtcgagagcggcatgggctggctgtattacctgctcatggggctgatcgcggtgtttctcggcacgttcggcagcgtgttcagcacgtattcgagtctgtacctgtccaaggacaacgacctgctgctgtcgctgccgatcccggtgcgctgcgtgatggcctcgcgcctgctgggcgtgtacctgctggggctgatgtacgccgcggtcgtcatcgtgccgggcgtgatcgtgtactggctcacggcaccggtcacggcggggacgatcgtcggcggcgtgctgatggtgctgatcgtgtccgtgatcgtgatggtgctctcgtgcctgctcggctgggtggtcgcgcgcatcagcctgaagctgaaaaacaagagcttcatcaccgtccttttgtcgctgctgtttctggcggcgtattacttcgtgtactacaaggcgcaggcgctcatcacactgctggtggaaaacgccgccgtgtacggcatgaagatccggggctcggcgtatctgctgtacctgttcggcagcgtcggcgcgggcgactggctggcgatggggatcgtgacggtcacgcaggcggcgctcctcgcgctgacgctgtggggcatcgcgcgcagcttcctgaagatcgccacggcgaccggcagcgtgaagaaggtgcgcttcgagcacagggccgtgcgcgcgcagagcgtgcagcgggcgctgttcggcaaggagctgcgccgcttcaccgccagcccgaactatatgctcaactgcgggctcggcattctgatgctgccggtggcgggcatcgtgctgctcatcaagggcggcgcgctcggccggatgctggccgacgtgttcagcggcaatgtgggcgttgtgccggtgctgatgtgcgcggcggtgtgcctgctcgcgtcgatgaatgacatggccgcgcccgccgtgtcgctcgagggcaggaatctgtggctcgtgcagtcgctgccggtcgtaccgtggcaggcgctgcgcgcgaagctggacgtgcagctcgtgctgaccggcgtgccggtgctgttttgcgccctgtgcatggtcattgcgctgccgggcagcgcgctggagaaggcgctgctggtgatcgtgacgctgctgtataccctgctgagcgcgctggccgcgctcgcgctcgggctcaagatgccgaacctgacgtggaccaacgagaccacgcccatcaagcagagcggctgcgtgatgctctcgctctttgccaactggttttatgccctcgcgcttggcgggctgtacttcctgtgcggcaatgcgctgagtgcagcggtgtatctggccatcttcgccgtcgtgacggcggcgggcagcgcactgctgctccgctgggtgaaaaagcagggcgcgcgcatctttgccgcgctctgaaagagaaacgaaagccgcctcggtccaatttggaccgaggcggctttttgctgcgcaatgcgcttacagcacgagcgacggggccgcgtagacgcgagccttgagctcgctgttgagcatgtacaggcccttggcgtccgtgccgaaaagctccattttcgtgatgagatcggcggcgttcttctcctcctcgccctgctctttgacaaaccagtcgagcagctgcatggtgcggaagtcgcggtcgtcatacgcggcggcgtagatgccgttgatgagcgaggtgacgtactgctcgtgctcgagcgcttttttcagcggggtcatgtggtcgccgcgcgtccagtccggcgcgtcgacggcaccgaagctgacggcaacgccgttgttgagcaggtactggaaaaacagcagcgcgtggtcgcgctcctcctgcgcctgcacgcggtaccagttttcaaagccgtcgagaccggcggccgcatagtagttggcaaagtccagatagagataggccgagtaaaactccttattgatctgctcgttgatgagctgggcaaccgttgcgttcatgggatgacctcctgatagaaaataagaatgattcttgatttctatcatacaggatttttccgccttgtcaagccccgagggaaactttttctggcgcgcaggcgcgtttcctgttaagatgggcgggagagaagcaaaaacgggaacggaggaacccacatggactacaacgaagttttacagcgggcgcgggcgcgcatggccccgcgctgcaaggtctgcccggagtgcaacggcctcggctgcggcaacacgatgcccggccccggctcaaaagcgcccggcaacggcgcgaacgacaactggcacgcgtggcggcgctggtgcctgaacatggacaccatcgctccgaacacgccggtggacacgtcgctggagctgctcggccggacattttccctgcccgtgatcgcggcgcccatcggctcgctgcgcgcgcagttcaatcctgaggacgacatccgcgactacaacgcctgctgcatcgctgcggcggcgcagaccggcatcgccgcgagctttggcgacgggctggacgcgcgcgtgttcccgcacgggtgcacgctctcgcagcagtacggcggcatcggcctgccggtcatcaatccgctgtcgatggacaccatccgggcaaacctcgaccttgccaacgcggcgcggccctttgccgtgagcgtggtcatcgactcggccggtctgccgcacctgaaggcggccagccccgacgccggcagcaagacggtcgcggagctgcgcgaactgtgcggctatgcgcagatgcccatgatcctcaagggtatcatgacggtgcgcggcgcggagaaggctgtggaggccggcgcggcggccatcgtcgtctcgaaccacggtgggcgcgtgctgcccggcagtgccgcgacggcggacgtcctgcccgagatcgcggacgcggtgggggatcgcgtgaagatcctcgtcgacggcggcatccgctcgggcacggacattttccgcgcgctcgcgctcggcgcggacgcggtgatgatctgccggccgtttctcatcagctactacggcggcggcatggagggcatcgtcacctacgtggagaagctgcgcgcagagctgacggacgcgatgtatatgtgcggcgcgcgcagtctcggcgacatcacgcgcgacatggtgcgcgaggtgcggtaacgaacacggcaaaaagcaaacagctgcgaagccttggcttcgcagctgtttttgcgctcacaggtgctggttgcgcgggatgcggtcatagtgccgcagcaaaatcggctcgaaggccgacagcagcttcatgtcgagattgaaaaagtagatcgtgaacgtcacggcgaatgcacccgcgctcacgccgagcagccgccacgcgaatttcggtatttgcatcgttccccttcctttctcaccatgcattttcgtccggcagaacctcgatcgacgggtcgagcggctcttcacgcatgacggtgcgcatataggcgttgagctggtcgcggatggcctggcgcgtgtagacgcgcgggtcgcacaggtcgtggcagacccagacgaggtggatgccgcgcgcgcgggcctgctcctcgaactggccgtgcatgccggtgagtgccttgcaggacatatgttcccacatgatgaccatgtcggcgtgcatcgtctcgcaaaattcccacagctcgtcgacgagcaccctgtagccgccgtgcgtgcggttgcgcatgatcatgttttcattcagccacgccatgtcgtagaacgcctgctcgcggttttcgggcgtgtcggtgtcggcgatcatgcgcgtgttgaccagcgagagcatatccgtcagcggcacgatgccccagcagtgcaccatccagttgagcatgtcgatgcagtactgcggctgcacaccccagacgatggcgcggtggcggtattccggcgccatcatgcggtgcgccttgttgccgcgctcggcgtagcgcatgatcttgcggtcgatgggcgggaacttggccgagcggccgcagttgcccatgtagttcgtgtcgttatacagcgagaacggcgcgccgacaaactgcgggtagggcgtgctgttcatctcgagccacgccagacggttgcgcgtggcatcgttgacgcgcttggcgcactcgaagtagtgcgaccagtcccagtgctggcccgtgtgctcctcgacgaaggcgatgacgttgcggatatcctgcgcggcgtaatcctgcacatcgtcctcctgatggcgcatgggcgcgacaagctggaacgtcgggatgccgtattcgcgctcgaggcgcttggcgatgatgccgttgcccatgagcgagccgtcgcaggtggtgttgcactgcacggcgcagacgccgagcacggcgaagtcatcgtcgatggagcagccggcctcggcctccggcatggggcagacgtcgcctgcgatgccgaactgctgcgccacgtcgaggtagtgcgtggaggagttttgcgtcaggaggtttgccacgaacatcgtcggcacttcgcgcaggatggccttcacgttcgggaagcccatcatgaacgcggtcatctcgttttcgtccgtgagcacgcattttttggaaaattccacgtcgttgccggtgcggcggtcgccgcggaagatgtcgtccatggtgctggccacgtcgtagaccacgaagtccatggacgtatggacgatgcgcagcgcctcgtcgcgcaggcccatcgtgaacttgtcgaccatgtgcggcacggcgaggtagttggccatccagcggtagcggaacatggccttgatgttgcgcggcttgacgatgaactttgcgaggagggacagaatgtacagccagcggccgtagtcatagagggtatccttgacgccgcgccactcgcgccggcagcggacctttccgccgtcgaagagtacgccgagctgctggtcgccgatgcgccgcttgccttcattggtcaccatcatcggacacctccctgtattttcttgatctctatgctctcgacgaatgcctggacgcgcgtgcgcatctggccgatcgaggagcggatgttgtacggccggtcaacggacagcacagggaaaccgaagtcttcgcgcagcatcaccgaaccgagcgtacgctcatatgcccacgggtcgcagaacttgatctgctgatagaggatgccgtcggcgttgtacgctctggcgatgtcggccacgtactgcttgcggccgtagaccttttccatgttcatcgtgcgcgggcactggccgcggtaaacatactggcggcagatctgcgtgagcgcgtcctcctcgtccgtgagcacgatcgggtcgcgtcccggaagcgagccgaagcagaaccggtcggcgcagacataggcgccggtgtcctcgatgagccggatgaattcgctgtcgtccacttcggagccgacgagcgcgatgcgcgcgcggtatgcccgctcctccggctcgcggctgcgtacttcctcgagcgtctcttccagtttgtcgatcagcaggtacttcggcgcgacataggtcgcgagcgtcagcacgtggaattcgtaacccgtgatgcgcggccggacctccttgcggaagtcgccgagcgcgcggatgagcgcgcacacgcggttgtgctcggccaccgccctgcggatggcggcgtcggacacgtccgtgccgaaggcgtcgtgcaggggcttgaggatgtggtttttgcactggagcacgagcaggtccacgccgttgtcgtcggccttgagcgggatctccatgtactcgtagaagaaatggtccttgccggcgcccatggtcttgagcagctccatgttttccacgcagcggttgatcatcgtacagccgtcgggcgcgatgacgcagtcggcaaagttgaagccgccctcgaccgcgcgctcgagcagggagcggctggtctcgcacaggaggctcgtcatgtaataggtcgcaatgtccatcgacccggtgttcggggcgtgcaggcgcacgccgaaggtgttgtccagattcatcaagggctcgggtgtgttctcgcagacaaaggcgacgcattttttgccttccgcctgggcttggacaacaagtgcgttgttggcctcctgcaggaggtcctcgaagtaggtcaggtgcttcaggtctctcattgctgcattcccccattctggttacacgttattctgttttcgtccgttccatgccgattgctatgttataattttaaccccaatatgtgccatacgtcaatccggtgatgatttttcatcactttgctgtggaaatgtcaaggatcgttgtgcagaatatacaatattttggagtggcttccaatatacgtgttgagaatttgccctccggtccggctggcggccgggagcatatgcggcttccgggcagcaaaaagccccgggagggaacgcatcgcgttcccttcccgggggctttgatcgaaatggtatgctcagaacgtcacgttcatgaacagcgccacgcagcacaggatcacggccagcggcacgtagacatagcggccgacgccgtaccagaacgcgccgtggtggcggcggctgccggtgttgacggcggcgagcaggtcgtccttcttcatgatgtagaaccacgacacggcgccgagcgtcgcgccgatggggatgatgtagatcgacacgaggtccatccacgggccccatttggagatgggctccatgagcaggccgaatccgaggcacagcacgcacaggatgccgagcacggccgcgcggctgagcttcgggaacttgtgcaggagcgattcggcgacggcctcgaacatgttctgcagcgagctgacgccggcaaagatcatggcgacgtacaaaatgacggcgaagagccggccgagcgggatgtcctgcaggatggtcggcagcgtcacgaacagcaggctcgggcccgcgccgacgtccagcccgtaggaaaagcaggcggggatgatgacgagcgcggcgacgacggcggcgatggtgtcaaaaatggccgtgtgctgcgccacgcccacgacgtcctcgtccttggacagatacgcgccgtagacgatcatgccgctgccggtgacggacagggagaaaaacgcctgccccatggcccagatccagatcatcgggtctttgagggcctcccagcgcggggtgaacatgaacttgtagccctcggccgagccgggcagcagcgccacgcgcacggccagcaccagaaagatgaggaaaaacagcggcatcatgaccttgttggtcttttcgatgctgtgtgcgccgagaaagagcgtcagcagtgtgccggccacgacgatgacgtggtaggggatgacggagtacggctgcgtggaaaacgacgcgaaccacacggcggcgtcgcccgtcatgagcgtgccgagcagggagtcgaccagcgccttgagaatgtacgtcacgatgacggcgtagccgatggcgatgcacagcgacccggccagcggcagccagccgagcaggccgccgacctttccggcggtcttgccgcgcgtggcccatgcgttttcataggcgccgagcgtgccggtgccggcgcggcggcccatggcgaactctgtcggcaggccgacggtgctgaagatgaccacaaacagcaggtagatcagcaggaaggccccgccgccgttgctgcccatcttgttcggaaagccccagacgttggccatgccgacggccgagccgacggacgcgaggataaagccccagcggctggcaaagcttttcgtgtttttcgttttcatacgcgctcccatccagacgtgaaaaacatctgtgcggcgcgcgccgcgcagatgtcgggtctgattctcgttttcgctgcgctttgcccgtgcacagcggcttcattttaaagtattgcagcggggaagtcaagaaaaatgccggattccttcaaaaatccggcagggtttcttgtggatttgacgaagggcgacaggaaaagcagagcctcgcgggttttgcccgtgaggctctgcagtgattttagcgatctgctttagaacttgatctccttgccggccttgcgccactgcttgaactccgcgacggcggtgaacagcgcatcggacgaggagttgatggcggtctcgacggagtcctgaatgacaccgatgatgaagccgacgccgacgacctgcatggcgatgtcattggagatgccgaacagggagcaggccatggggatgagcagcagcgagccgcccgcaacgccggacgcgccgcacgcgccgagcgctgccatgacggacaggatgatcgcaacggggagctggacggtgatgccgagcgtgtgcaccgcggcgagcgtcatgacggtgatggtgacggccgcgcccgccatgttgatggtcgcgccgagggggatggacacggagtagaactccttgtccaggccgaggctctcgcacagggacatattcacggggatgttcgcggcggacgagcgggtgaagaacgcggtcacgccgctttccttcaggcacttgaacaccagcggataggggttcttgcggatgacgatgaacgtcatgatggggttgacgacgagggcggcaaagagcatgcagccgacgaggatgagcaggagcttgccgtactcggtaaagatggcaaggccgctggtggaaacggcggagaacacgagacccagaatgccgaacggggcgagattgatgacgaagcgcaccgccttggtgacggcctcggaggcgtcggcgaggaacttcttggtcgtgtcggacgcgcccttgaacgcgaagccgagcacgatagcccagaacagaacgccgagatagttggccgagacgatcgagccgatggggttggagacaatgttgttgagcaggccggtgaagatggcggcgaagctctcgggcgcgctgtcggagacggcctcagtcagcgtgatggtcacggggaacaggtagcttgcgatcacggcgatgacagccgccaggaacgtggagacaaggtagagcacgatgacggtgccgaactgcttgcccagcttctccttggactgggcaagggcgctgatgatgaggacaaagaccagcagcggggcgatggccttcagggcaccgacaaacagggtgccaaggatgccgatgccgggcgcggtcacggcggcgttggggatcagcagggcgagcgccgcgccgatgaccatgccgatcacgatgcgcagcacaaggctgacgctgttgtacgctttgacaagtttcattcttttttcttccttttttctgtttgttttgcgtgaagaggcgcaagagacagtgtaacaagatgtgaacacaatgtcaacagggaagccgaccggaatgctgctctgtatccggattttgcgggagaatgcgcagacgcaaaagtcggggcggtcattgaccgcccccgacttgttgtcgcttcgggggtgtcccccgatgcgcgcgtcagatctgctcctcgacgtccttgtcgtcgtggtatgcgatgagcgcgttgtagatcttttcgatgagcttcatgtccgcgttggtcatgtatgccagaaacagcagaccaaagagtgcggcgagcacgatgagcacgatccaataccaggccatattcgttcctccttaccagctgagtgtgtcttcgtaatccaacagagtggggtcaagcggcttctcgttgagcaccgtgaccatatactggctgaatgcctcgcgcatctcgcggcgcgagaccgtgcgcggatccatgacgtcgtgcgggatccagatgaggtggatgccgcgctcgcgcgcctgatcctcaaacaggccgtgcagaccgccgacgttcttgcacgatacgtggtcgtacatgatgacgatgttcgtgtggaacttctcgcacatcttccagcactcgtcgagcaggttgacatagccgccgttggtgtgcgagcgcatcatcatcttctcatagcagcgcacgagatcggccagcgcctgctccttgtcgccgatggtgatgggctggtagctgagcatggcctccatgtcgttgacgcaggtgacaccccagcagtgctgcgtccagtaggtaaagttggtgtaatagtgcgcggggcatgcccagacgaggcagcggtatttcggctggggcgcgttggccgccttgtcctgctcgtagcccttgagcatcatcttcgtgacgcggcggtccgtcttgagcatgaacttgtccatgcaggctgccgccatgaactcatattcgcgctgcagtgccagcgccgcaccgcagacctgtgggtgctcggtgcagttgacgtcccacttctcgatcatacagcgcgagctctcgttgtacatttcggcgtttttccagaaggcgtcccagtcccatttgacgccgaactgctgctcgagaaattcgatgccctttttcaggttcttgaccgcataggtctgtacttccggttcgttgacacgctgcggcggcgtgatctggaacgagggaagctccttgaagtgccgcgtgaggatgtttgtctgcgagatcgcgccgtcgcacggcatcgtgccggtgaagtagcacttgccgacgcgcggatagtcgtccaccacggcgcagccgctctcggcggcgggttcggggcaaacgtccgccggcagaccgaggtgctccatggcgtcaatgtagaacatgctggcgttctggtcgacctccgacggcagaccgatggcgaacatggcgatgtcgatccacttcacggtggggaaccccatcatgatcaggtgcggggtcatctcatcgaacatgacggtgttctcgcgcagcttcgccgcgtgcttgctgttggggcgcaggttcttgtcgcgtaggatgatgtcacgcacgccgaggacggagttatgcagcacggagaaaaactggttgtgtgcatagcgcagctccttgccgcgcagccccatggtgtggcggtcgaccatgtgcgctgcggtgagataggacaccatccagcggtagcgcagcatggccttgaccatcaggatcgggtggcagccaagctttgcggccatgaagccgtagagatacagccagcggaagaaatcataaaaggtgtctcggaagccgcgccattcgcgggcgcggaaggcgcggtgctcggcggaatagaagcggccgaggcccttgccggttttggggttgtaggccatgtcagttgtcctccttttgcgctgagcgaagctgcttcatttccagactctccacaaaggcctgcacgcgcgtgcgcagctggccgctctgccctgcgatgtaggggcggtcgatggagaggatgtgaatgccgtaatcacgcggcatgacctggtttgcaatcacgcgctcatacgaccagtaggtgcagaacttcatctgctcgtagatcgcgccgtcggccttgaaatcatgcacaagctgggcgacgtggtcgttgcggtactggacgcggtgcagcgcgctctggcgcgggcactcggtgtgctgcaggtaccagcggcacacctgcgtgagtgcatcctcgccgtcggtgagcacgatctcctgacggccggggaagctgccgtagcagtagcggtcggcgaccaccagcgcgccgcagctctcgatgagccggatcagatccgggtcgtcgatctcggagccgacgacggcgacgcgcacacggtagtttttctgcgcatcaacctcgcgcgtctttacctcggcgagcgtctcgcgcaacagcggcaggatcagccgcttcgggcagacgtagctcacgagcaccagcacggcgtattcatagcccgtgatgggcgggttgtccagcttgcgcgtctcgccgatctcggtgaggatgcggcagacctcgttgtgctcgctgaccgcggcgcggatggcggcgtccgaggtgtcgacgccgtagttttcgcgcatgggcttgaggatcttgcgcgagacctgctcgcagatgtgctcgacgcagtcctcatcgtcggaatacgggatgtcgaggttgcagtagaagaatttgtccttgtccgcaccctgcgcgtgcatgatctccatgttctcgatggcgcggttgttggcctcgcacacgtcgacgcccgccatggcgtgcaggaagccgtagttgccctcaagcgcgcgctcgaggatcgcgcgggaaaactcgcagctgttgttggccatgtagtaggtggctagctccatggacgtggtgtgcggcgcgcgcagacgcaccgagaagcagctgcccagattcagcagcacctccggcgcgtgaaagcaggtatagccgatcgccagatctccttctgcctcggcctggcggacaagttcgttgtgcgcgtcgtccagcaggcgctcaaagtacatcaaatgcttcagttccttcattgcggcccttctttctttggatttctatcttccttctccgcttatgtcagcatcgctgacataagcgggtatacacaaatcccgatcgctcgggatctgctgtgtatgtggttatttgccgctgagtgcgcgcacgaacatctggctcaggtggcgcatccggctgtcgtaatcaagcgcgctcgcgctcggcgagccgccgatagacaggcgctgcatgatgccgaggatcgcatcgtaggagttgtagtagatctcccgcacgtcgacctccgggctgatcgagccgtcggcaagtcccttgcggatcgccttggccatcgggccgctggaggtctcaaacggctcgggcggctggtttttgatctcgtggagtctgcccgcggcatgcagcgtcaactccgcgtcgagcgtgaagcgcatgccgttcgggtcgaggcggtagagctgggaatagcagacgaggacgttttccgcgtcctgcaggccggtcgtgctgccgtcggatgccgtgtgggacatccggtcgatgcgctcgaggatgcgcttccagtagagcagggacgcggccaggaccagatcggccttggtctcaaagtagcgaaaggccgaccgctcggtgagcccggagcgcagcgcgatatctgcgaccttggtcttttcgatcccgttggccagaaaacagtccagcgcgacctccgtgaccagccggatattcttttctctctgctcctcgtgcggcaagtgcgttcgcctcctctgctcctgtcagttacactgacaggagcagtgtaccgcgaaaagcggggaatgtcaagcccttaacagaacgcacagaaaataaaaaattaccgttgttgatatggtatcaacaacggtaatgaatttggttgcggagacaggatttgaacctgcgacctccgggttatgagcccgacgagctaccgaactgctccactccgcgatatgaacttgaccctcaaggctcatatactataacatatgagccttgggttgtcaagtgttatttttatcgctccgaagcggaagattcttcctcttctgcggcgtccagtgtcttggcggcctcggcgcggccattttgcagcttgagctcggcgagaatgtccgccagcagctcgtccgtggtcggcttggccggggcttccggttcgggctccttttctttcttgcggttgaagcggttgatgatcttcaccatccagaacacgacgagcgaaatacacaggaagttgatgatagacatgatcaggtcgccgatcgggaacacgccgatgttcaggccggagaagtccagcccgccgatgatgagcgagatgagcggattgatgatatcgttgacgagcgcggtgacgatggccgtgaacgcgccgccgaccacaacgccgacggccaggtcaatgacgttgccgcgtgagatgaataccttgaattcatcgagccaaccgggctttttcatgatgctgcctcccctgttttctttgtcgtttcagtgcttgggtacgaggacttccgtgccgcccatgtacgagcgcagcacctcgggaatgacgacgctgccgtcgggctgcaggttgttctcgaggaacgcgatgagcatacgcggcggggcgacgcaggtgttgttgagcgtgtgggcgagataattcttgccgtccttgcccttgatgcggatgtgcaggcggcgggcctgcgcatcgccgaggttcgagcaggagcagacctcaaagtacttctgctggcgcgggctccaggcctcgatgtcacaggacttgaccttcaggtcggcaaggtcgccggagcagcactcgagctggcgcaccgggatatccaggctgcggaagagctcgacggagtagcgccagagcttctcgtaccagtccatgctctcctccgggcggcagacgacgatcatctcctgcttttcaaactggtggatgcggtacacgccgcgctcctcgatgccgtgcgcgcccttttccttgcggaagcagggcgaataggacgtcatcgtctgcggcagctgatcctcggtgaggatctgatcgatgtagcggccgatcatggagtgctcgctcgtgccgatcagatagaggtcctcgccctcgatcttgtacatcatggcgtccatgtccgtctggctcatgacgccctcgaccacgttgccgtggatcatgaacggcgggatgcagtaggtaaagcccttgccgatcatgaaatcgcgcgcgtaggccagcacggcctcgtgcagacgggcgatgtcgcccatgagatagtaaaatccgttgccggagacgcggcgtgcggcgtcgagatcaatgccgtcgaagcgctccatgatctccgtgtggtacgggatcgggaaatctggcacgacggcctcgccgaagcgctgcacctccacgttgcagctgtcgtccgggccgagcggcacgctggggtcgatgatctgcgggatggtgagcatgatcttgtggatcttggcctcgagttcctcctcctgcttttcaagctcggccagacgcgccgcctgcgcggtgacctgcgccttgacggcctcggcctcttcaagcttggagggatcttttttcgcctgccccatgagcatgccgatttttttcgacagggcgttgcgctcagcgcgcagattcgacgcctcgttgatggcggcgcggttggccttgtcgagctcaatcacttcgtcgacgagcgggagcttggcgtcctgaaattttttgcggatgttttcccgaacgagatcggggttttcgcggatcagtcgaatgtcaatcatggtgtctctgtctcctcattctatgtgtatcagtttctgcggccgatggcctcgagcgcctgcagcagcgcctcgcggtcgtccgcgtcgtagtattccagttcgatgcgcccggtctttcggccctgcgtcatgcgcaccttgcggccgagcacctgctcgagatgccgcgcgcattcgccgagataatccacaccggcggccttttttgccggtttttccagcgtatccttcagtaattgcgcggccagcgcttccgcccggcgcacggacaggcccttttcaatgacggttttcgccgcggcaagctgcatttcctggtcgctgagcggcaggagcgcgcgcgcgtgcccggcggagagcgtgccgtcctcgacgagcttcagcaccggctcggacagcgccagcagccgcgtcgcgtttgcgacggcggggcgcgatttgcccacgctctgcgccacatcgtcctgcgtcatgccgtagacatcctgcagggcgcggtagcccttcgcctcttcaatgggattcagatcctcacgctggaggttttcgaccagcgccatctccatggcgcgctgctcgtccgctgtcaggatgcgcaccggcacttccttgagcccggccatgcggctggcgcgccagcggcgctcgcccgcgatgatctgataaaatccgccatcgagcggccggaccgtgatcggctggatgagcccatatgtccggatggattctgcgagcatttccagcgcctccgggtcaaagtgcttgcgcggctggtcggcgcgcggctcgatcttctcgatcggcagcaggtcgggcgctgtctcctcgcgttccggctgcggggccggatattcctccccgaagagcgcgccgaggcccatgccgagacccttctttccgtctttacccatgttccacctccgctgcggccgccgcggccgcggcctccgccgcttttgccgccttttcctcgcgcttgatgagctcacccgccagatgcaggtacgcccgcgcgcccttcgactctttgtcgtaggcgatggcgggtttgcggtggctcggcgcctcggacaggcgcacgttgcgcgggatcatggtcttgtagacctttttgccgaagaatttgcgcacctcgttcacgacctgatcggacagcttcgtgcggccgtcgtacatggtcatgacgatgccctgcaccgtcagttccggattcaggcgcttgttgcacattttgatgctgcgcatgaggtcggcaatgccctcgagcgcgtaatattcgcactgcaccgggataagtacgctgtcggccgcgacgagcgcgttgatcgtcagcagctcgagcgacggcggacagtcgatgaggatgaagtcgtaatcgtcctgcaccgcggcgagcgcagttttcatgatgtattcccgctgctcggagctcacgagctccacagagcagccggagagattcatatttgctggcagcacgtcgccgtatttcgtgctgcggatgcagtcggctgcggctgcgccgttcatcagcatgtcgtagcagttgggcgtcgcggttttgtccacgcccatgccggaggtgctgttgccctgtgggtcgcagtcgacgaggagcacgcgccgcccgcgctttttgagcgcgcaggtcagattcacgcacgtggtcgtcttgccgactccgcctttctggttggcgacggcaatgattttgcccatggtttgcctcctgaatcgtgtttgcagctattataacagcgtgcggccgcgttttcaaccgcttggaggcgctgcggcaaatttttgtgatgtttcacgtgaaacaatgcgaaatccggcgggcgtgtttcacgtgaaacattgcctcaggacaggaacatatccacgtcgccgatggtcagcccgtcgtgcagcgcgagattgatgccgtagccgatgagtttggccgcatcacgcactacggtgtcgatatcgcgcggtgtgacgaacatctgctctgcgcgggggtcgtccgaaaagccgccggcgtcaatgacggtcggcaggccgatggccgcgaccggaatgccgagcgtgtcgcggctgagaccggcgcggtcattgccgacgccgctgccgggcgtgatgccggtgtccgtgagctggacggtgcggccgaggcggtcgagctccgcgcaggcgagtgcgtctacggcgatgatggcgtccgggcgtaggtgggccgcgagcgcgcggatcatatcggcggattccacgcccgtcgtgccgagcacgccggccgcgagcgcggccacggggcggaactgtccgaaatgctccggcagctgctcgcgcaggtggcgcgtgaccatgacgctgtcgatcgcgtccgggccgacggcgtcgggcgtgatcgcccggttgccgagaccgacaacgagcacggaggcgtccggcatcagcggcagcacgccgcgcagcagctcagcgagcgtctgcgccgcgttttcaaacgcatcgtcctcgcgccgcagcagcgggtcgagcgcgagggtgtagtagtcgccaatcggtttacataatgcattttcgccggcggcgtcgagcacgtgcacctcggtcacggaaaagccgcggcggttcgtctcctcggcgcgcacgccgggcagttccgtgacggcggctgcgctgcggtggatggcttcggcctcgacggcgaggtcggtgcggggaaaattcggcataacagactcctttctgacgccacatcttgtggctcactggaagcgttgccacaaatggatacatttataatgaaaatcgaaaaaagtgcttgcaatttgaagggtttgatgatatcatcaacacttgcagaacattgcacggtcatacccatgactgaattttataggaggaggtggcgattgagaaatgccgaacatcaagtccgcaatgaagagagacgaaaagtccaagctgcagaatctgaaaaacaaggctgagaaatccgccctgaagaccaacctgaagaagtttgatgcggctgttgccgaaggcaaccgtgacgcagccgtcagtacctataaagttgctgtccaggctgttgaccgcgcggccggcaagggtctgattcacaagaacaacgcagcgcacaagaagtctgcgatggctcagaaaatgaacgagcttggctgatccacagaatctcgggggcatggcagtttgccatgccctttttgctaccccgacaggaggctgattatgaaaaaacgtatgatgctgatcatcaaccccatggccggacgcagcggctacaagaccggcttcggcgaggtgatgaacattctcgacagcggcggatacctgacgacggtgtacttcacgcagggccgcggcgacgcgaccgtgtttgccgcgcagcacgcggcggagtatgacaccgtggcctgcatcggcggcgacggcacgctcagcgaggtcgtctcgggcctgatgcaggtgccgaacccgcccccgctgggctatatcccgatgggcacgacgaacgatgtggcctcgacgcttggcctgccgaaaaacgcgacggacgcggccctgcgcatcgtgaccggcacgccgacggcgtttgatgtcggcagcttcggcgagcagagctttttcacctacgtcgcggcgttcggcgcgttcacggccgtgagttatgagacgccgcagaacgaaaagcaggcgctcggccacctggcctacgtgctcgaggcgatgggccggctcaacgccatcgaccattactgcgcgcacgtggagtacgacggcggcacggtcgacggcgacttcatcttcggcggcgtgtcgaactcgacctccgtggccggcatggtgcgcctgcgcaaggacctcgtgagcctgggcgacggcctgttcgagacgctgctcatccgccgtccgaagcagttcggcgacctgagccgcatcatcacgggcgtgctcaaccagtattacgacaacgagaacgtcatcctcgtgcagtcgaagaatttgcgcttcacatttgaagagcccgtggcctggacgcgcgacggcgaggccggcggcgtgacgacggacgtgacgctgcgcaacaaccacgctgcgatccacatcatcgcataacagcgaatctctgagcaaaaccggcgggaaatccgccggttttgtgtttgtgcgcgcaagaagcggttgaaaaacacgcgcattgtgcgtataataaggaagttatctctcaaaatccatcggaaacgaggctgatgatatgaaaagacagcacatcgccggcatctatgcatccccggagaccttcggcggccagaccatgaccgtctgcggctgggcgcgcacgatccgcgacatgaagaatttcggctttatcgagctcaacgacggcagctgcttcaagagcctgcaggtcgtgctcgagcgcggcaagctcgaaaattacgacgagatcgcccgccagaacgtcggcgcggcgttcatcgtgcacggcgagctcgtgctcacgccggacgccaagcagccgtttgaactcaaggccgacagcgtcacggtcgagggcgtgtccgcgccggactatccgctgcagaaaaagcgccacagcgtggagttcctgcgcacgatccagcatctgcgtccgcgcacgaacctcttcagcgcgacgttccgcgtccgcagcgtggccgcgcaggcggtgcacacgttcttccaggaccgcggcttcgtctacgtccagaccccgatcatcacgggctctgactgtgagggcgcgggcgagatgttccgcgtcacgacgctcgacctcgacaatcttccgcgcacggcggacggtaaggtcgatttctccaaggatttcttcggcaagagcacgaacctgaccgtgtccggccagctcaacgccgagaacttcgcgctcgcctttggcgacgtgtacaccttcggcccgacgttccgcgccgagaactccaacacccagcgccacgccgccgagttctggatgatcgagccggagatggcgtttgccgacctcgacgacgatctcgagtgcatggaggcgatggtgaagttcatcatcaacaccgtgctcgaaaagtgcccgcaggagatggaatttttcaattccttcgtggacaagggcctgctcgagcgcttgcgcaacgtggtggacaacgatttcggccgcatcacgtataccgacgctgtgaagctgctcaaagactccggccacaagttcgactaccccgttgagtggggcatcgacctgcagacggagcacgagcgctacctgaccgagcaggtgttcaacaagcccgtgttcgtcacggattatccgaaggagatcaaggcgttttacatgcgcatgaacgacgacggcaagactgtcgccgcggcggactgccttgtgccgggcatcggcgagatcatcggcggcagccaacgcgaggagcggctcgacctgctcaccaagcgcatgcaggagcttggcctgcgcgaggaagactactggtggtatcttgatctgcgccgctacggcagctgccgccacgccggcttcggtctcggctttgagcgcatggtcatgtacctgaccggcgtgagcaacatccgcgatgtggagctgcacccgcgcacggtcggcaacgcggacttctgatttcgatttgtgcatgaaggatgcccccggaagcgatctgcttccgggggcattttgcggcccaaacaggcccccgcgggtgcgggggcctgcttgcatatggggtcagtacgcctcgatctcctgaatggtcatgtcgcggccggagaggggcatgagcttttttccgccgcagtccgggcaggagaggtcctcaacgtcggcgacgaactccgccccgcagtcgagacagcgggcgcggccagcctccgtctcgacgcgcaggggcacgccgtcatactccgtgccgtcggtcacggcgacccagcagtcggtgagaaagcgcgggacaacgcccgagagcgtcccgacgcggaccgtgatgctgcgcacgccctcgagcgcctgctcgcgggagatatcgcgcaccattttgagcatcgcgtcgcacagtgccagctcgtgcattacttgctgaccgcctttttcacgatgctgcccgcgcgcttgacgacgccctcggcgaccttgatcggcatggtctcatacgagcccgcgtgccagtcgcgcaccttcttgaggtggatggcatcgaacttgcacttcgtggtgcacaggccgcagccgatgcacaggtagctgtccaccttcgttgcgccgcagccgaggcagcgggcgcactccctgcgcacctgctcttccgtgaacgtgacgcgcgcgtcggagaaggtcttggccttggcggcgttgtagcccggcatctggcggtgatctttatcgaaatcggccgtctcgatgagcacgtgctccttgtcgagcgccttgtagactctgcggtcgcggccggcggtgagcgtctggccggggtgcacatagcggtgcaggctgatggcggcctccttgccggcggcaatggcgtcgatggcaaacttcgggccggtgtagcagtcgccgccgacgaaaatgtccggctgcgcggtctgataggtcagcgcgtcggcctcggccgtgcccttcttcgtcgtcgtgagcgcgccggtatcgagcgtgccccagtcgaccgtctggccgatggcgccgatgacggaatcgaccgcgagcgtctcgaattcgcccgtgccgacgggcttgcggcggcccttctcgtccggctcgccgagcaccatgcgctccacacggatgcccgtgaccttgccgtccgtgccgaggatctcgaccggggcggtcaggaagcggaactgcacgccctcttccatcgcctctttgacctcctcggggtcggcgggcagctcggcttcgctgcggcggtagagcacgtacgtctcgtctgcgccgaggcgcaccgcgctgcggcagacgtccatggccacgttgccgccgccgatgacggcacagcgcttgccgatatgcgtctcgtggccgaggttcacggcgcgcaggaagtccacgccgccgtagacgccatcaagctcctcgcccgggatgcggagcttggccgacttctgcgcgccgatggcaacgtagaagcccttgtagccctgcgcgcgcagctgctcgatggtgatgtccctgccgacctcaacgccgcattggaactcgacgcccatctcgcgcaggatgtcgatctcggcgttgagcacgtctttttccagccggaagctcgggatgccgagcgtgagcataccgccgggcaccgggttgcggtcgaacacggtcacggggtagcccttgttggcgaggtagtaggcacagctcatgccggcagggccggcgccgatgacggcgatcttctccgtgtacgggcggccgatctggttgagcagcttcggcacgtagcgcgtggcctcgtgcaggtcgtggtcggcgatgaagcgcttgacctcgtcgatggcgacggcctcgtccacgtcgccgcgggtgcactcggcctcgcagcgcttgttgcagatgcggccgcagacggccgggaacgggttttctttcttgatgagttcgagcgcgtccgtgtagcggccctgcgcggcgagcttcaggtagccctgcacggggatgtgcgccgggcaggcggtcttgcacggggcggtgccggtgggcacgacgtcctcgtggtcctcgcggtagttcgggtcccacgtgcgcttcggatgcagggtctcggagagcttgacgtagtccggcttctgtgtcaggtcctcggtcgagcagagcttctggccgagcttgagcgcgttgccggggcaggtctccacgcactggccgcaggcgacgcacttggcctcgtccacctcggcaacgtagttggagcggatcgcgtcgcgcgcgccgtacatcaggcccacgcgcaggccgaagcaggcgcaggcgcagcagttgcagatggccgcgctctcgcccggctcttcgatgttgaccatgtcgtgcatgaggccgttttcctcggcgcgcttgataatttcgagcgcctgctcgcgtgtgatctccttggcgcggccggagcggatgtagtgctcggcgcccttgcccatttggatgcacatgtcctcatcgaggtggccgcagccgtcgccgatgctcgtgcgcgatgcgcggcaggagcacggggacacggagaagcggtcgtacttgtccagatagtgcgagatgcgctcaaattcgttcacgccgggaatgccctcgagcgcgctctcgaccgggatgacgcgcatgaggccgtagccgtcggggatcatggcgcccatgttcgccgcgaggttgcgggtgtattcctcgaacgcgcggccgacctccggatgcgtgtcgagcagctccttctggttgaccatcatctcgaggatgccgggcgcgaagatctgcatgtaatacgtgtcctcgccgagcgtctcgttgtgcgagcggcggaagatgccgtagtacacgaggttgtcgagcagaggctgcacctcctgcacggtcttgccgaccttcctggccaggtaggccgcggtgcgctccttgcgcaggccagccgcgatggcgacatccgcttcctcgtcggtcaggatgcctgccatgcagtagtattcgggcgcgttttcgtcgatcctggtcgtgatgccggtgacgcccccaatgatcttcgccagcttcacgatcttcggtctgagttgtgccatggtctctcctccttcatgttgttgcgctgagattgtcactactataacatatgcatgcgcgcagggaaacgaaatttcccattttcggcgatatgcaacaagcgtcgcgcaaatgtgccgaaatctgcgcaaaaaagcaggccctcgcgggtgcgggggcctgctgcggtgcgcgtgtcagaacttgacgaagccggtggtcgtgcccatcgggtagccgagcgtccactcctgcctgccgcactgggggcagacctcgccgcgggctttgagctcgtcgataaaagcctcggcgcgcatgatgtacatattcgtcttgcgcacgtagcggcagtgcccgcagaagaccacataggtcgcaaagctgtcatacacgccgcgggcgcggttttccttttcctcggcggtcagcggccgggggttgacattatgattgactgccatggtttgctcctcccctgtcagatctggtgctcgcgcttgacgctgtcatagtgtttgttcaaaaacggcacgacgacggagcgcatgagcttcatgtcgaggttatagtaatagatcacgaacagcacggccagcgcgccgccggtgatgccaaaagctcggaacaggaactgcgcaaatttgcatttcatatcggtggacctcctttaccagcccatgctgtcgtcaaagtcgagcagcgacggatcgaccggctcctcgtgcatgacgttgatcatgtattcgttgacggtgcggcgcgcctcggccggagagacgatgcggtgatccatcagcgagtgcggcatccacaccgtgtggaagcgctcgtcatgcttgcggatctcctcctcgatcagaccctgcgcaccggccatgcccttgcagccgatgtcgtcgtacatgatgatcatgtcgcagttgaacttctccgccgtctcccacatctgcatcaggtggcggttgccgccgacggtgtgcgtgcgcatcggggtgcgggcgtgccagtcggccacgtcgctcatcatgatgtcgcggtcctcggtgtcgacgatgttgtggccggtgagcgaatccatgttgatcaggcacaggatgccccagcagttatacagccactgcacgccgtgtgcgtaatacgtcgagccgcagctccaggcgatggcgcggtggcgcgtgagcgggaaggtgtcgatgttcttgcgcacacatttatcaaagatgcgcatgagcttgtgcgaggccttgaggaagtactcgttgccgccctgctggtagaagtagatgcgaaacagcccctggcacacggggttgagcgcgccgttgttcgtcttggcatagacgtcccagcgctcggtctcctcgcggttgaactggttggtgttttcgatgtgctggatgaacgtgtcccagttgaacggctggtggaactgctcttcgaggaagtggatggcgtcgtacacctcgtgcacgccgagctccttgcaggtcgggtcgtcatacatgagcggcgtcgtgaacgggtgcacggccttcttgccgtcgcttgagagcgcgcggtacatggcgacgttgtccatcatgttcgcgtcgcaggggttgttcgtcgtgagccagcagttgccgatatcggggtactcgccctcgacggcgacgccggtctccacgagcggcagcgtgcacatatcgcccgggatgccgcagctgacagcctggtcgacgtagtacgagccgaggttcttgttcaaaatcggcaccatgaatgccgcgtgctgctggatgttgatgccgtagtagccggggaagccgtagatgatgtgcttcggcagcgtgtagtcaaaggcgatcgtgcgctcggtccacttgttctcgccgaagcggcggtcggcgcggatctcgcgccagagcgtcgtgatggagtcggacaccatgcagtcgatggccgtcaggtcggcgcgcaggaccatgccgcggtcaccctcgatccatttgtcgaccatcatcggcgtggccagatacgcgctcagccagcgatacttccagaaggcgcggatcatgcgcaccgggtcgcggccgatgagcccggccatcttgccccaggtctgcagccagcgggcgaaggcataggccgtgtccttcacgccgcgccactcgcggtggaagtagaagttcgtgccctcgatgtacaggtcgccaagataatggcactcgttgtcaccccgcaggaagtggccgagcgtgccgtattcttctttgagcgtgcgtttgcgtttccacatagctgaacccctcccttattgctgcgcctggatcttcttgatctccagcgactcgatgaacgcctggaaccgggtgcgcagctggccggaggcggcgctcgtgtaatccttctcgatctggcacacggggatgctgcgcggcagctcatagccctcgtagaaccacatgccgtcctgcgcgcgctcgtagccccagtattcgcagaacttcatgttctcgacgatgatgccgtcggcgcggtatttctccgcgagatcgaagatgtatttcttgcgcgcgatgatgttctcggggcccatggcgcgcgggcactggttgcgccacatatagtagtcggcgatggactgcaaaacgtccttgccctcctcgagcgggatctcctcgcggccgggcatcgagccgaagcagtagcggtcggccacgaccatgccgccggccatctcgagcattttcgtgaactcggggtcgtcgatctcgctgccggcaatgaggatgcgcgcgcggtaccacggcttcgggtcgggctggcgttcgcgcagctcctgcagcgtctcgcgcaggtacggcaggatgaggtccttcgggcacgtgagcgtgcacagctggatgacgtggaactcataccccgtgatgaccgggttgtccgccatgcgcatggcgttcatctccgtgatgatgcggcacacttcgttgaactgctcgacggccttgcgcagcttttcctccgagaagtccacgccgtagaccttttcgagcggctggatgatcttctgctcgatctggcggcggtagtagcccgcgtgccactcggtcttgcgcagcggcatgtcgagatacgtgcagaagaacttgtcgttcgggatcagctcgcagtattcaaaatactgctccatgcggttcatcgtcgtgcagcactcctgcccgatgagcgcggagataaagttgtagccgccctcaaacgcacgctcgaggatgctcttggagtacgggcacgagcggttggtcatgtagtaggtggccatgtcggggttcgtgcagttcggcgcgcgcaggcgcacgccaaagcagttgtccgtgtccagcaaaacctccggtatgtacgaacagttccatgccagcgccagccgcccatccttgcaggcgtcctgaaccaggtcgttgtttgcctgctgcagcaggttctcaaaatagatcagatgcttcaggtctctcattcgcgcattccctccttcgatgcacaaattccgcgccaacgatgaaaattcgacattttgcacaagcgcagaacgttaacacacatttattatagaactttgcctgaatcatgtcaatatgtgtaacaagtgattattaacggacatttcgcttttttctgcctgaaaagcggaaaagctgcaggaaagcgcttgtcaaaagcaagacaaagtgataacataaatttatatatgcaaaaaaattgccgggaaaaccggcgtttttcaatgaaaaaacaacgcggcacgcccgcagaagccgaggcttctgcgggcgtgttttttgttcggcgaaaaaacggcaccgatcgtgccgcgaaaacggaaaattcgtccggcgcgcatatccgtacgcaaatccgccgacaataaccgggaagcaaatcccgtaaactgcggctttggaggaatggatatgtacaaaaaagattttattgacaccaacgatttcacaaaacaggaactgctggacatcatcgacctgtcgctcgccatcaagcgcgccatccgccggggttattatcccccgctgatgaaaaatatgaacctcggcatgatctttcagcagtcgagcacccgcacgcgcgtgtcgttcgagacggccatgagccagctcggcggccacgcgcagtatctcggccctggcatgatccagctcggcggccacgagaccatcggcgacacgggcaaggtgctctcgcgcctggtcgacgtggtcatggcccgcgtcatcgagcacaagacgatcgttgagctcgccgatgcgtgcacgatcccggtcatcaacggcatgagcgactataaccaccccacgcaggagatcggcgacctgtgcaccatcaaggaaaacctgcccgagggcaatcggctggaggactgcaaggtcgtcttcgtcggcgacggaacgcaggtgtgcgcgtccctcggcttcatcaccacgaagctcggcatgcactttgtgcactacggcccggagggccaccagctgaacgccgaccacaagcgcattctggaggccaactgcaagctctccggcggcagctgggccgtcacggacgagcgcgacgccgtgcgcggcgcggactttatctatactgacgtctggtacggcctgtatgaaaacgagatgccgaaggaagagcgcgtgcgcgtctttgccgactaccaggtcaaccgcgagctcatgcagctcggcgcgctcggctgcaagttcctgcactgtctgcctgctacgcgcggcgaggacgtgaccgacgaggtcgccgactccgccgcctccctctgctgggagcaggccggcaaccgcctgacggccatgcgcggcctgctggtgtatttcacgcgctgccgccgcgtcccgacggagctggagcttgccgcggcgcaggaggagctcgacaccttcctcgacgcgcggctcggcggctgctgaccggctgccaaaggagcagacaccatggaagaacgaaaaaaattccgccttgcggacgtcgtcctctctgtcatctgcgtcgtgttcgtggcggaggcggcggcgcccgtcgcctccatcggcaacagccagtatttctggtgggtgttcatgatgatcgccttcctgctgccgtacggcatgatctcgtccgagctcggcacgacgtataccggcgacggcgggctctatgactggatcaacaaggcgttcccgcgctcgaagtggggcgcgcgcgcctcgtggtactactggatcaactttccgctgtggatggcctcgctcgccgtcgtgtgcccggagctgctcggcgtgctcacagggctgcagttcgggtggctggcaaagctgctcatcgagctcgccttcatctggatcgtcacgtggatcgcattttaccctgtgtgcgacagcatcctcatcctcaacatcagcgccgccatcaaaatggtcctcgcgctgacggtcggcgtgctcggcatcgtctacgtcgtgaaaaacggctttgtcaacgacatggccttccgcacgttcctgccggggtttgacctgcacagcctgtcgtatatctcggtcatcatcttcaacttcctgggcttcgaggtcgtgtgcacgtatgccgacaatatgcgcgaccccaagcgccagatcccgcaggccgtcgtcaccggcggcatcgtcatcgcgctcatctacctgttttcggccttcggcatcggcgcggccatccccacgcacgagatcagcgaggactcgggcctcatcgacgccgtctcgctcatgaccggccgcacgagcggctggttcgtcggcgcggtggcgctgctgtttctcattaccctgttcggcaacatgatctcgtggtccatgggcgtgaactccacggcggcctacgccgccgaaaacggcgacatgcccgcgatctttgcaaagcgctgggcgaaaaacgacatgcccatcggctccgcgctcacgagcggcatcgtggcgagcgtcgtgtgcatcctcggcatcatcatcgagctgctctcgccggattcgtccctgttctggagcttttttgcgctcaacctcgtcatgctcctgctgagctatgcgcccgtgttcccggcgtttttgcgcctgcgggagatcgaccccgattccgagcggccgtttcgcgtgccgggcgggcacgggatgctgcgcgtgctggcctatgtgcccatggcgctcatcctcatctcgatcttcttcacggcggtgccgctgtcgttcgatacggacacgctctcgtactatctgccgatcacgatcgggtcgatcctcagcatcgtcatcggcgaaattctcatcgcggcgcgtgcgcgccggcatcattcttaggaggaaaacgttatggcaaaacgaatcaccggttctacgccgaagctcgacggctaccggatgcctgcggagtttgagccgcaggccggcgtctggatgctctggccggagcgcaacgacaactggcgcgacggcgccaagcccgcgcagaaagcctttctggacgtggccacggccattttgcagtttgaacccgtgacggtctgcgtctccccggcgcagtaccagaatgcgcgcgagcgcctgccgcgcgccgtgcgcgtcgtcgagatggcgagcaacgacgcctggatccgcgactgcgggccgacgtttctcgtcaacggcaacggcggcgtgcgcgccgtggactggacgttcaacgcctggggcgggctggtcgacgggctctatttcccgtgggatctcgacgatcaggtcgcgcagaaggtctgcgagatcgagcgcgtcgattcctaccgcaccgagggcttcgtgctcgagggcggctccatccacgtcgacggtgagggcaccgtgctcacgaccgagatgtgcctgctgtccgaggggcgcaaccccgacatggaccgcggcgccatcgagcgcatgctctgcgactatctcggctgcgagaaggtgctctggctgcgcgacggcatcgaccccgaggagaccaacggccacatcgacgacgtggcctgcttcatccgcccgggcgaggtcgcctgcatctggacggacgacccgcaaaacccgttctatcagccggcgcgcgacgcgtacgacacgctctcgcaggcgacggacgccaaaggccgcaaactgaaggtgcacaagctctgcctgacgcagcagccctgcctgctgcagggcgcggcgacgatcgacgccgtggagggcacgatcccgcgcgaggatggcgaggtcgccatcgcgtcgtatatgaacttcctcatcgtcaacggcggcgttatcctgccgcagtacggcgacgcgaacgacgcgctcgccgtgcagcaggtgcaggccatgttccccgaccgccgcgtggtcggcgtgcagacgcgcgaggtcgcgttcggcggcgggaacatccactgcatcacgcagcagcagcccgcgccgcagcacaggtgacgccatggccagaatcgtcattgctctcggcggcaacgcgctcggcagcacgccggcggagcagcgcgaacgcgtggccgccgcgtgcccggcgctcgtcgggctcatccatcagggccacgagatcatcatcagccacggcaacggcccgcaggtcggcatgatccaggcggcgttcgacaccgccgcgaaaacgaaccccaaggtcgcgcccatgccgctgccggagtgcacggccatgagccagggctatatcggctaccacctgcagcagggcatgcgccgcacgctgcgcgccaatggtatgccctggcaggtggcgacggtcgtcacgcaggtcgtcgtcgacccggacgaccccgcgttcggcgagccgacaaagcccatcggcgcgttttacgatgaggccgccgcggagcagatgatgcgtgatgatccgtccctgcgtatgcgggaggactccggccgcggctggcggcgcgttgtcgcctcgccgaagccggtggatattgccgagcggcgctcgattctgaacctgctcgacagtgagtatatcgtcatcgcctgcggcggcggcggtgtgcccgtcgtgcgcgacgcgcacggggactactacggcgtggacgccgtcatcgacaaggactttgcttccgcgtgcctggccgaagccgtcggcgcggactatctgttcatcctcacggcggtcgaccacgtctgcctgaacttcggcacgccggagcagcgggcgctcgacgagctgcacgtggatgaggcggagacctacctgcgcgccgggcagttcggcgccggctccatgcagccgaaggtggccgcggccgtgcagttcgtgcgcagcggctggcggcggcgcgccgtcatcgcctcgctcgagcaggccccggccgccatgcgcggcgagagcggcacacgcatcgtgccgtaaaagcaaacagaaacccggcctttcccagtgcgggaaaggccgggttttctcagccgggcagctccaggatcgccatctcgatgaaggcgctcgtgagcttttgcaccatttgatcatccgtctccgtcttgccgtgctcgacccagacggtcagcacaccgatcatggacgacgtgatgatggcgacgaaataatcaaaccgcgcgggatcgtccgccatcggccgcagcgcctggatcaggccggagctgcggcgcagactgtcgaacaaaatgtccgtccggtggatctgcacgagcgcctcgagcaccgcgctgttgcgaaaccagtactgaaataccgccttggccaggctgccgcgctgctcgggcggcagggtgttgtactcgctgaacacggcctgaaacccgcggtcgcacagcagcgccagcacgtcctcgaggcagtcgaagttgcggtaaaacgtcgagcggctcaccgtcgaggcgcgctgcacgtccgtgatcgtgatgcgcgcgaacggtttttctttcatgcaggccaaaaggcccgcgcaaataagctccgtagacgcccgcgcgcgtttgtcgttcttgatgtggtacattttggtctccaacgttctatattttacggtactattgtatcgcaaaaaggcttggtgtacaatagggacaatcaaaatttaagggagtgtttcacatgagcgaaaatgtgatcttctgctactctggcaccggcaactgtctcgacatggcgaaaaccatcgcccgggagctgggcgacacggacatcatccttatgcgcaaagagcccgcggtcacggacgtgcgtgacgccaagcgcgtcggcttcgtcttcccgtgctacggcggcggtctgcccggcggcgtggaggagtcgctgcgcaagatccaggtcggcctcacggcgtatacattcggcgtctgccagtacgcgggctacatgggctccggcctgtacaagctcaacagcatcatccccctgcgctactggacggccgtgtcgcaccagtgcacgtgcatctggctgctgccgcacagcgtgatgctgccgccggtgacgcccgccatggcgcagcgccgcgcggacaaaaaggcaaagcagatcgcgcaggatgttcttgcccgggcggtctcgcccaaggccccgccgaaaaagcccatcaaccagctcgagagcagcatctggccgaagatcgtggccggcaaggcgcagaagtttgccgtcagcgatgcgtgcgtcgcctgcggtcagtgcgcccggctctgcccgcgcggcaacatccgcatcgagggcggccgcgccgtcatcggcggcaactgcatccagtgcctgagctgcctgcagtactgcccgcagcaggccatctcgatcggcaggatcaccgaccgccgcgagcactatcacaaccccaacgtgaccgccgcggagctgaccgagccggtcatccacatcgactgagcggttttcctctctacatagcagcccgcccgccggaactccggcgggcgggctttccgcttgagcgaatgctcagacgtgtacgatgtagttttccttgcgcggggcggcctccggtgcagggccggcggcatagccgagcgcgatcgcgccgacgccgcgcagcgcctccggcaggccccagtcgcgcagcagcgccttgccgtccgggctgtcaaagatctcgcgctcgcggttgacccacacggtgccgagcccctcggcgtgcgcggccagcatgaggttttcgagcacgcagctgccgtcggccagataatttgcgcgctctccgtcgccgagcacgaccacgatcaccggcgcgccgtagtaggggtcgacatccctgccgatcacggcggcgttgagctttgtcagacggtcgcggtaagctttcgtctccacggcgacgatcgttgccgactgctcgcccatggccgacggggcgtaggtgccggcctcgagcacgcgcgcgagtgtgtctgcgggcacggcgtccggcttgtaggcgcggatgctccgccgggtctttatgagtgtcagaaaatcgtttttcatcggatagcctccttaatatatttatttaaaaatgtttgaaataagcataccacatttttcgccgatgtgctataatattcaattaatttctatccgtcgttacgcgcgaaaggagtttctcaggccatgcagaagatcgcagctttcatcgtcaaaaaacgcaggctattgcttgtcgtcatgctggctctggcggtggtctgcgcggcgctgatgcccttcgtcggcatcaacaccgacatgaccaagtacctgccggacagctcgcagatgaagatcggcatggaccgcatgaacgaggccttccccgacgtggcggagacgtacaccatccgcgtcatgttccgcgggctggacgcgcgcgacaagcttgccatccgcgagcagctggcggagatcccgaatgtggacagcgtggcctacgagccggacagcggcgactacaaccgcggcgacgccacgctctacaagctcaccacgcagtatgactacaactccgacgaggaggcgcagatcgagcgcgacgtggccgaccgctttgacggctacgacgtggccgtgcgcagcgacgacacctcgacaccggatatcccgccgatcgtgttcatcctctcgatcgtgcttgtgacgacgatcctgctcatcgcctgcccgtcgtacttcgagccggtgctgtttctcatcacgatcggcatcgccgtgctcatcaaccagggcacgaacatcttcctcggcgagacgtcggacgtcacggcgagcatctcggccattttgcagctcgcgctctcgatggactattccatcatcctcatgaatcgctaccggcaggagctgcaggccgatcccgaccgcgaggctgccatgacgcgcgcgctcgcggcggcgttcggctcgatcaccggcagctcggtcacgacgatcgtgggattgctgatgctggtgttcatgcgcttcaagatcggcatggatctcggcattgtgctggccaagggcgtgctgtgcagcctgctgtgcgtgttcacggtgctgcccggcctgattttgtgggcggataagctcgtgcgcaagacgacgaaaaagccgcgcgcgcccaagcgcgagcgccggagcgtgctcgcggcgctcggccgcttcagctaccggtggcgcggcgcgatcgcagcggcgttcgtgctgctgttcgcgggtacgtatattctgcagctgtctacccagatcgcctacacgctcacggacgccgacccggtcgcggaggtgttcccgccggacaaccccatcgtcgtgctgtacaacaacgccgacgaggacgccgtggccgcgctggcggaccggctcgaggccgacccgaacgtcaagagcgccatggcctactccaccacgctcggcaggcagtacaccgccgcgcagatggtcaatgtcgtcggcgcgctcgacgccagcatcccggtcagcgccgatatgctgggcatgatctattacgatgcccacagcggcggccgcgccgtgaccatcccggccgggcagtttctgcgctttgttaccgaccacgtggcaaataatgccgccttcgcgccgtatctcgacgcgggcatgacggccaatcttcagacactgcaaaagttcaccgaccctgccgcgctcacgcagcagcggacggcggagtcgctggcggactttctcggcatggacgcggcggacgccaaacagctgctgctctactactacacgcagcacggcgatgcgagcaccggcggtatgacgctgcccgccttctccgacttcctcgtcaacgaagtgctcaccgactccaccttggccgacatggtcgacgcctcggcgcgcgagcaggcggccacgctgcagacgttcacggacgtgagcgccatgaccacgccgcgcggctgcgacgagatcgcgcagatgctcggcatggacgaggataccgtccggctgctgttcgtggcataccacacgctcaacggcgacctgctcacgggcgattggaacgtttcgatgcagaccctggtcaacttcctcgccgagcacagcgccctgctcgatgatgcgcaggcgcagcagatcacgatgctcagccggatcatcaacggctcggtcgacggcacgagctactcggcggcggagcttgccgacctcctcggcatggacgccgggcaggtgcgccagctctacctgctctacatcagccgccacggcgacacgagcggctggacgctctcggtgcagcagtttgtggacttcctgtgccaggaggtgctgccggacgcgcgctttgccgaccagctcagcggcgtggataccagccagctccagtcggcgcgcacggtcatcgacgcggtcgcctccggccggagttatacggcggcggaactggcaaacctgtttcagggcctgtccagccagctggaccgcggcacgatggagctgctgtttctctactatgccagcgtgtacagcagcgatgcctcgtggacgatgtccatgcaggagctgtttgactacctgcagaacgatctgctcacggacgcgcgctttgcgtccttcctgaccgacgacatgcgcgcgcagatcaccgacgcgcagacgatgctcaccgatgccgtcacgcagctgcgcggcagcaactactcccgcctcgtgctcacgacgacgctgccgggcgagtcggacgagacgagcgcgttcatcgcgcagctcatgcaggatctcgacgccgtcacgaccggggactattacctcatcggcaacagcgccatggtctacgagatggaaaacagcttcgacagcgagctgctgctcatcacgctcctgacggcggcgtcgatcttccttgtcgtcgtgttcacgttccgctcgctcgtcattccggcgctgctcgtgctgatcgtgcagtgcggcgtgttcatcaccgtcacggtcgtcggattgcaggggctggagatctactaccttgcgctgctgatcgtcgagtgcatcctcatgggtgcgacgatcgactacggcatcctctacacgagttattaccgcgagatgcgcgagagcatgtccgtgcgcgacgcgctcatcgccgcctaccgcggcagcatccacacggtgctcacctccggctcgatcatggtgctcgtcacggcggtcgtcgggaaatttttcggcaacccgaccatcgagcagatctgccgcacgatttccatcggcgcgttctcggccatcatcctcatcctgctgtttctgcccggcatgctcgccctgctcgaccgctgggtgctgccgcgcgacctgcgccgccggctgtatccgccgaaggcgcccaaggccccgaaagcgccaaaaccgcccaaggcggcgcgggcgtcctggccgtaaccaaacagatgcacagaaaaaacaaggcggcgtaccgattatggtacgccgcctttccgcgtgttcaaaaagcctcgcagcgtttgccgcccgcaggcggcaaaacattgcaagccttttgttttcaaaagtgcagcacttcgatcagcagcagccaggccagaccgtcttcatactgcttccgacgtgaaggaattccacaggtgctcaaagacggtggtcatctccgctgtcagcgcgtccgggtcgaggttcggctcggtcaggtagcgcttgaggttctggatgagcccgccgacggtgaacgtcgccagcgtgtcggcaagttccgggctgtccgtcacggcgccgcagtaggcgcgcacgcgccggctggaactggcgaagatgtgctcgctgatgatctcgaagatgatcggcagcgacttgctgcgcaggcccatgcggatgagcgccgggcgctcgtctataaaggcgatgagcgcgcgccacgagcgctggaaatgctccacgggcgagtcggtcgcggcgtcggcctcgctctcgatctgccactggatctcgttgaggtaaaagcgcaggaagtcgtacttatcttcaaaatgcgagtagaacgtcgggcggcggatgagtgcccgggcgcacagctcattgaccgtgatgtcgtcaaacgtctcctcggccatcagcgcctcgaacgccgccatgagcgcacgataggttttctgcacgcgcagatcgttctttttttccatgatgccgcactcctttacgcccatcgtatcgtatcgaacaaacgacacgagcggaacaagcgataaatatcttacactttcatgataactgatatttgtaatttatcatttttcagcttatctttctgttatcaaaaagtcaacccccgcgtttttgtcggggtaaggagtggtgattccattatgaatcagaaaccgtccccgctgcaccgtgcatcggaatggatcgtcgaccattaccggctgtttttcgtcgtctttgccgcgctgctggtcttttccgcggtcgcgtccggctgggtgaaggtcgaaaacgacgttgcggcctatctgccggccgattccgagacgcggcaggggctggacatcatggagcaggagttccagacctacgggtcggcgaagatcctcctgcgcgacacggacgcggatgccgccgcggccacggcggagcagatccgcgcggtcgacggggtggacagctgcacgtacacgatgaatgatacgggcagcgcgctgctgagcgttagcctgtcggatctggaggggtcggacacgtgcgcgcagaccgtgcaggccctgcgcgacctgctcgacggcagcggcgcgtacatttattccgccgagggctacagcatctccgatcagatcaacggcgaggtgcgcggcctgctcgtcatcgtggcgatcatcctcgtcacggtgctcacgttcacgtcctcgacgtatgccgaggtgcccatcctgctcatcacgttcctcgcggcggcgctcatcaacaagggcacgaacttcgttttcggcacgatctcgttcgtgtccaacgccgtggccatcctgctgcagctggccatgtcggtggactacgccatcattttctgcaaccgctacaagcaggcgcatgagacgctgccggtgcgcgaggcagtcatcgagtcgctggaaaaatccattaccgtcatcagctcctcgagcctgacgaccattgcgggcctcgtcgccatgacgttcatgaagttcggcctcgggcgcgacctcggcatcgtgctcatcaaggcgatcttgatcagcatgctgacggtgttcctgctcatgccggggctgctgctcaagctcggcccggccatggataagacgaagcaccgcaacttcgtgccgaagatctcgggcgtcggccgtctcgcgtggcggacgcgccgcgtggtgccgctggtgttcgcggccgtgctcgtcgtggcgtgcatcggcgccaaccgcgtgagctatgtttacagcgaagcgccgctcaaaacgcacaacgcggacgtcaaccgcaccgcgtcgcaggcgatcacggatgatttcggcgacgagacggtgctggccgtcgtcgtcccggccggggattatacccaggaggccgcgctgctcgacgccctctcggctctgccggaggtcaagagcgccgtcggcattgcgggcacggaggcggccggcggctaccggctggcggacgcggtcgattaccggacgttcgcgcagctcagcggcgcggacagcacgagcgcgccggcgctcttcgcgctctacgcggccgaaaacggcgccgcgcagacggccgcgcaggatctgagcggctatcaggtgccgctgctgaagctgttcgaattcctgaatgacaagatcgccgacggcaccgtcacgctcagcgccgcgcaggcggcgcaggtcacggcgctcagcagccagctcgagcgcgccagcgcgcagctcgagggcacgtcgtaccatcgtctcgtgctcacgcttgccgcggcctcggacggggacgagacgtttgccctgctcgaccgcatccacgccgtcgtgcaccagtactaccccaccgacagctatctcgtcggcgacgccatgtccgcctacgggtccgagcaaacgttcacgcaggacaacgtcatggtcagcgccatgtccatcctcatggtcatgctcgtgctgctgttcacgttccgctcgctcggtatgcccattttgctcacgctcgtcattcagggcagcatctggatcaacttcggcatcacggtgctcacgggcgagtatgtgctcttcatggtctatctcgtggccagcgccattcagatgggctgcaacgtggactatgcgatcgtcgtcgcctcgcactataccgaggcgcgcgccgatcagggcccgcgcgaggccatgatcacggcgctgaacctcgccttcccgaccatcatcacatccggcacgatgctcatctccgccggcctgctcatcggcgcgcgcgtctcgtccggcgcggtggccggcatgggccggttcgtgggcgtcgggtcgctcatcacggtgtttctcgtgctgttcgtgctgccgcagcttctgctgctgggcgataccttcgtgcgccggacggcactgcccgcgcagcgccgcctgccgctgaccgcggcgagccgcgcggcccgctgggtgctgctcgcggcggcggtgttcgtcatggccgtgtcgccgtggagcgtcgtgcgcacgcagcagaagcgggccgaccgtgtcgtcgccgatacgcagctgtgcggcagcgcccgctcgctcggcgagctggcggcgtccctcggcgcgcagcaggagacgtatgacgcgctcaagctctcgtttgctacgggcgtcgtgacggataacgtcggccagagccggctcgagagcgggcaggcggagtatgacgccggcagagaaaagctcgccgccgggcagcaggcgctcgacgctgcggcggccgagatcgcggccgggcagagcaagctcgacacggcggccggtacgctggcctccggccggcagacgctggcggcgaaccggcagcagctggcgcaggacctcgcggcgctcaccccgtatgaggacgacaccgagcggctggagcagggcatcgccgtgctcatgcaggacgagacgctgcgcgcgcgggcaggcgcgtccgcgagctatggcgacatctgcgcgctcgcgcaggatctctacacggcggatatggacactgcgcgcacggaggcggcggtctggacgggcatctgcatcgcactgttcgcggccggtgcgctcgcgttcgcgggcgtgtgcctcggccacaggagcggaaaggccgtggcgtggtgcacggcgctggcggcgatcctgtccgtcggctgcctgatcgccatgctggccgccggtcacggtgcgctgcgcacgctgtgcctgtgcgcggcgctggcgctgctcgtgctggcgttcgtggccgccgggttcacgctccggcagcgcgcgcagcgggcgcagtaaggcacagggaaagaaaaaaccggggcgcaggcagctgcctgcaccccggttttgcttttgcgccgcgctgtgttataatgggccatcacggtcgaaaggaattgcgatcccaatggtcaaagtgctctttatctgccacggcaacatctgccgcagcccgatggcggagtatctgctccgggacatggtgcggcggcaggggctcgcggcgcagtttcagatcgcctcggcggcgacgagccgcgaggagatcggcaacgacgtctacccgcccgcacgcgccgagctgcgcgcgcacggcgtccccgtcggtcaccgcgccgccgtgcaggtcacgccgcgcgactacgatgattacgactggctgctgacgatggacgagaacaacgcgcgcaacctccgccgcatacttccgcacgacccggacgggaagatccgagcgctgctgtcgtttgcgggcctgcagcgcggcatcgccgacccgtggtatacgggcgatttcggcacgacgtatgacgatctcgtgctcggctgcacggcgtttctggacgcgctgcgccgccgcggcgatatttaaaaagaatgaccgccccggccggggcggtcattcctgtttatggcgcaatatccgggagcgaaaggccgagtctttcggccagctcggccagataacggatgtggccgtcatccgcactgcggatggtgaagtatccggttttgtcagccgtgatgttctgcccgtggcagattacccgctcctctttttgcaaatagacctgcttgccatgggctttttcgcgctggtatgcgtgcacagcgttcagatagtattgtgcaaacagtgcttgtgctttttccaggtcgcccagatggccgcagatcattgcttcgtcgagcaggatcagctgccggcccatcacatcgaagtgcggatagtcacaccggtgcgcgagaatcgccttccgggaggacagcacgtcgtagacgggcagtacttttgtcagcacatcgggcagaatctgattcaggagctgtgacggctgctttcgcaggtcaaagcacagctcctgcctgccgtcaatgctcccgagacgggagcgcagggtacagttgtattcgcggtaatatcgttttggtggcgatggggaaaaggtgcgctcgtcgcactccggtatgcggatgccgagattgacccacatttgctgtgcggggcccgcagacggcaaaccgcactggaagtggatgacctgcgacaggtcgccggagacaaagcggtgcagtgtccgcccgtatttccggaagccgagcggcttgagctgcgcatagacggcggcctcaatctcgtcggtgcatatggctgctttggatttttcgttcatgttcgtactccctccgaggggatcgcactttcatcaaaaaccgcccggaaggctgtgccctccgggcggttttgcgcgtatgcaaaagccttcacaccgaccagtgccggcggtcaaacagcgcgatcgtcacggcgacggcggcggcgaaaaacaccagcgccggccacggcagccccagcacccgcggcagcggggcgagacacgtgatggccgcgcagaacagtagcgagcagtccagcaacgcaaagatgagccggttcagcagcttcgactgcgcggcgcgcgccgcgtccgaccacgattttttcacgttgacggtcagctgcccggcattggccttgctcaggaacgccgacagctgcgtcggcagcaccgtgagcttttcgcccgagcgggcgagctgctgcgcgagcgtcttgaccttcttttcaatgtgttcgcggctcagggcggtgttcttgacgtactccgccacgatctcgatgacgttcgcgtccggcgacacgctcgtgagcatgccctgaatgacgagcaggctgcgcccgagcatcgtcagcgaggcgggcacggacacgccgtattcgttcaggatctgcacgaactcgtccacaagcacgcccatgtccatatcggccatcggcatggactcatacttgtgcaggaagatgccgatgcgctcggtgagcgcctgctggtcgggcgcgcggtcgtactggccgagcgcgagcagcgtctgcgtcagggcgggcacgtcctggtcatagatcgtgcggatgatgcccgtgtacagctccgcctcgcgcgggctgatgcggcccatcatgccgaggtcgagccagatgatcttcccgccctgcacgcggatgttgccgggatgggggtcggcgtggaaaaagcggtagaccgtgatctggcggatgtagttgtgcacgagcttgacggcgatctcgttgagatcatacccgtcggcgcgcaggccgtcggtatcgtcgatctggtggccggcgatgtactccatgacgagcacgtttttcgtgcaccacttcgggaacgtggccgggcagtcggcgtaggccacgccgtcgttgagacgcttgaactcggcgatgttgttcgcctcgatcgtgaagtcgagctcctcctgtacggtgtgccagatctcgtcgagcacggcgtgaaaatccagtgcgctcgcaagcggtgtgtacttgagcagcgcggcggcacgcttgagcaggcgcacgtcgcggctcatgatgtcgtacagatccgggcgctgcacctttacgaccacgcgctggccgtccgtgagcgtcgcggcgtgcacctgcgcgatggaggccgagccgagcggccggatgccgatgtccgaaaagacctcctgccacgggcgggcgtaggcctgcgtgaggatgtcctccacctcggtcagcggcatgggcgtcacgtccgtgcgcagcgtctcgagcgcggcacagtattctttgggcagaatgtccgaacgcatggacagaatttgtccgaatttgacaaacgtcggcccgaggtccacgaaaatatcgcggaccttctccggcgtcagcccctgaacgaggtgatgcttttgcagaatggcgacgatctcggcgaagcgcttggcctcgtcgagctgcgcggcggggccggccatcagtctgcttccttcttggccagcagcttttgcagcagcgcctcgcgctcgtcggcgctcatggcgtccacgtccacggcgggcttttcgtcctcgtccttcgtcacggcctgcttgcaggtgcgcttgagctcttcgttgagcacgcggcccttctccacggtcacttcgccgcgcgcgacgcactcgtcgagcagcttgccgagcttttcgcagccgaggtcggccgcgcccacggaggcgacgatcagcttgcgcagatagctttcaatagaatccataatccatacactccttatcttatcttgtgcactttgcggtatcgtatgcccggtcccgggcggggatcacgagttggcgtcggccgcggcggccgcatcgagcagcgccatgacccggcggtaaaacaggcgcgtgcgcacgacaccgttgttcatcacgccgccgatcgcggccagatggtcgagatgctcaaccggcagcacctgccacacgccgcgcaccggcgtctgtccgggcgcaaagtccgcgtgcggcgcgccgccgggatagcgggcagagatcgtgttgaccagcccatcgttcggtagccagtcgcgcggtatgcccgcgccgtcgcgccccatcgcggtcgaaaacggccagagcagcggcgtcatggccgtgtcgggcttctggtcgtgcgtgagcaggcgcggcagcgtccggcagcaggggatggagaaataccacgtgtccggcagcgtttcgacacgcgcattgagcgcccgcgcgcccgcgggacgcaggtcgtcaaaggcgttgtcgcccgccggcagcgggttttgcgccagcatgcgcagcgccgccgtcgtgagcggctcgtccgggtcgcgccggatgccgaactggtcgagccggaagtcgtacacgcccttgaatgccgagatgccgagcgcgcgcgccgcgcccagaaacagcgtcgagagcgcatttgccgcgtccggctgcacgttgagaaacgtggacccgtcgtgcggtgcggcgatggcgaccagcgcgtgcacccagtctgccttgccgccggtgaacagcggtgagggcgcctcgcccgcggcctcggccgcctgcacctcctccgggcagccgtgcgcgagcagctgcgccagcagccgcgccgtcgcgccgccgaagctgtggcccacgaggtcgacgggcctgtccgcgccccaatcgggcacgagcgggttcgggtacgccgtgccgaagcgcgcgtggccgaagcgctgcgcgtgcgcgatgccgtagtcggcagtgccgccggtgagctcggcatagagctcgcaagcgcggtcccacgcactcgagatgatgcccaccgaggcggcgcggcagtcatacccgcaggcgttgagataacccagcacatcgcctgccgcgagcccccagtagggcacggcgcggtagagcgcgtcgcgcgcgccccagcccagcagaccgtgcacgaacacggtcgggtacggcgtgcggccgccgggcgatgcgtccggcagcaggcattcgcccacttccagcgtctgctgcagcagctgctgcggtgttttcatggcgcgcctcctcccaaagcaaatgcatttacatttttatcaatcatagcacacccgggcgggagcgtcaatgccgcggcgcggcggcgtaaaatgacggaaatacacagaggtacgccggaagaattgtgcacaaatgccaaaagtaaataaattctgaaaaacggggttgactttatcggctaaaagcgctaaagtaggcacatcttcagtacaggaggccgcaaacatgcgtctggagcgatttgcaagcgcatattcctactattactttagcgaaagtaatagtcgtttgtgctgcaaaaataccagaaccatctgagacttcccgatccggttttgacaaggctgcacagacgactgtgtggcttttttctttgccgggactacatttaggaggagaaaacgcatgaacatcaaaaaaatcactgccctgctctgcgccgtggtcatggtcctgtccctggccgcctgcggcagcaacggcgacaaggccgagaataagcactacaccgtcggcatctgccagcttgtgcagcacgacgcgctcgacgcggccaccaagggcttccgcgacgccatcaccgacgcgctcggcgccgagaacgtcaccttcgacgagcagaacgctgccggcgacacgcccacctgcgccaccatctgcaacggcttcgtgtccagcggcgtggatctgatcctcgccaacgcgaccggcgccctgcaggctgcggccgccgccacgaaggacattccgatcctcggcacggctgtcacggagtacggcgttgcgctcggcatcgataacttcagcggcaccgtcggcggcaacatctccggcacgtccgacctggccccgctcgaccagcaggcggccatgatccaggaactgttcccggatgccaagaacgtcggcatcatctactgctccggcgagccgaactccgtctaccaggtcgaggtcgtcaaggccgcgcttgagaaggccggctgcaccgtgaatacatacaccttctccgacacgaacgatgttgtctccgtcaccggcacggcgagtgacgcaaacgacgtgctctatatcccgaccgacaacaccgccgcctcctgcgccgaggccatcaagagcgccgccaagaagcccatcatcgccggcgaggagggcatctgcaaggcctgcggcgttgcaacgctgtccatcgactactacgagctcggccgcaccaccggtgagatggccgtgaagatcctcaagggcgaggccgatatctccaccatggcgatcgagtactacccgaacccggtcaagaagtacaaccccgacatggccagcctctacaacgtcaccatcccgagcgactacgaggccatcggctgattttcaacacgattcccggctccctgccgcagtttctgcggcagggatactccacactatgaggtaatgatatgaattcactggttcttgcgtccctgagcctgccgaatctggtttcgcgtctgcccggcggcgttgcccagggcatcatctggggcatcatggccctgggcgtgtacatcacgttccgcctgctcgacgtcgccgatctgacggtcgacgggtcgttcaccaccggcggcgccgtgacggtcatgctcatcatcgccggctggccggcatgggcggcgctgctcgcggccgtggtcgcgggtctgctcgcgggtcttgtgaccggcctgctgcacacgaagctcggcattccggccatcctcgccggcatcctgacgcagttcgcgctctactcgatcaacctgcgcatcatgagcatgaaggccaacaccccggtcaacccggataagtacagcctgtttctgacgctgcgcagcgtgccaggcgcgatctggaagggtctgctgctcgcggccgtgctcatcgcgctcctctactggtacttcggcaccgagcagggcagcgccatccgcgccacgggcgccaacccgtcgatgagccgcgcgcagggcatcaacatcaatgccatgaaggtgctcggcctgtcgctctccaacggcatggtcgcgctctccggcggcctgatggcgcagtaccagggctttgccgacatcaacatgggccgcggcgcgattgtcatcggcctcgccgccgtcatcatcggcgaggtgctgtgcgacgcgttcttccgcaagggctgcaacttctccgtgcgcctgagctttgtcatcctcggcggcatcgtgtattacctcgttatggtgctcatcctctggctcaagctcgacccgaacgatctcaagctcttcaccgccgtgatcgtggccgcgttcctggccgtgccgtatctcaaggggcaggccaagagctcgttccaccgcctgaagaagggagacaagtgatatgctgacattagaccatatctccaagaccttcaaccccggcaccatcaatgagaaacgggcgctcgacggattgtccctgcatctgaagccgggcgatttcgtgaccgtcatcggcggcaacggcgccggcaaatccaccatgctcaacgccgtcgcgggcgtctggccggtggactccggccgcatcatcctcgacggtgtggacgtgactgccatgccggagtaccgccgcgcgcagtacatcggccgcgtgttccaggaccccatgatgggcacggcagcgaacatgcagatcgaggagaacctcgccctcgccgcgcgccgtggcaagaagcgcacgctgcgctggggcgtcacgaaggcggagcgcgaggaatatcatgagaagctcaagagctttggcctcggccttgaggaccgcatgacggcgaaggtcggcctgctctccggcggccagcgccaggcgctgacgctgctcatggcctccctgcaaaagccgaagctgctcctgctcgacgagcacaccgcggcgctcgaccccgcgacggcggccaaggtgctcgagctgtcggaccgcatcgtgcgcgaaaaccagctcaccgccatgatgatcacccacaacatgaaggacgccatcgttcacggcaaccgcctcatcatgatgaacgagggccacatcatcctcgatattgagggtgaggagaaaaagaagctcacgaagcaggacctgctcgaaaagttcgccgaggtggcgggcgcgcaggtcgagtccgacgaggtgctcctgagctgacgcgcggacatcccgaccgatcggatattgagaaaaaatctccggcgcctgaacgcacaggcgccggagatgtttcttttccttccgttttctgccgcgcatttccgcccgtgcagcagcacccacgaaaaccaccaaataacgggcagaaagtttgtgcagtttttttgtcggaaaccgcacacaaacgccgaaatttatgttaaccttttcatacgaatttttttgcttttgcgggtttgtcgagggttcaggaggatagggtccgtggttttcagcagcctgtcgtttttgttttgcttctttccggcgtttctgctggtgtattatctgacaccgtcgcgcccggccggcgcgcgcaatgccgtgctgctggtggggagctgtgtgttttatatcatcggactggacggtcagtgggcgtactttgcgctgctggccgcatctgtgctggtcaactacgggctgggccttgccatcacgcgcgacaagccgcgcgcaaagctgtggctcatcgtcggactgtgctacaatttcctgtggctgttcctatttaaatatctcaacttcctgctcaccggcgtcaacggtgtgctcggctgggtgtccggcggcaaggcggccgtgccgctgctgggctgggcgctgccggtcggcatcagcttttacacgttttcggccggcggctatctcatcgacgtctaccgcggcacggtcgcgccggagcgctcgctgctcacattcggcacgtacctgaccatgttcccgaagctcgtctccggcccgatcgcgagctatgcgcagctgcagccggagttcggcgcacgcgatgtgtcgctgcggcaggcggtcgatgggctgaagctgttcgtgttcggcatggcgttcaagatcctgctcgccaaccagctcggcggcctctggagcgatgtgaccacgatcggctttgagagcctctcgacgccgctggcgtggatggctgcgttcgcgtattcgttccagctctatttcgacttctggggctactcgctcatggccatcggcatcggccggatgctcggcttccacctgccggaaaacttccgctgcccgtacctcgcgctgagcatgacggagttctggcgccggtggcacatcacgctgggcacatggttccgcaattatctgtatttcccgctcggcggcagccgctgcagccgcgggcgcatgatcttcaacctcctggtcgtctggctggcgaccgggctctggcacggcgcgcacctgaacttcctgctctggggtctgggcctgtttggaatcctcacggtcgaaaagctctggctcaaaaaataccttgaccgctggccggtgctcgggcatctgtacatgctcgtgctcatcccgctgtcgtgggcggtgttttccgtgtcggatctcgggcagctcggcgcgtacttcggccgcctgctgccgctgttttcgcacacggcggcggcttacccgctcgattttctcaagtacggcaagacctacggggtgttcctcgtgctgggcctcgtgtgctcgacgtcgctgccggcttatctgtaccgccggctcaagggcacgtgggccggggcagtcattctggccgtgctgttctggctgtgcctgttctgcctgagcaagggcatgaacgatccctttatgtacttccgattttaaggagcgctgacgtatgaaacgcatcaaaccgcaatattttctcatcctgctgctggtggccgcgctcgcggcggcaccgtttctcatccgcggcctgatcgaccgcagcagtgtcggcaagcagccggccgcatccgtcactgcggcgccggaagagaccgccgagccgacgcccacgcccgagccgacgccgctgcagttcacgacggtggacacctcgtattttgacgatgcgctcttcatcggcgactcgcgcaccgttggtattgccgaatacggcagcctgaaaaacgcgacgtatttcgccgacgtcggcctgaacgtctacgttgcgcagaccaaggccattgccgtgaaaaacgtcggcacggtcacgctgccgcagctgctgagccagaaaacgttcggcaaggtctacatcatgctcggcatcaacgagctcggcaacgatctggacgacatcacggccaagttctcctcgctcatcgacaccgtgcgcgccgcgcagccggacgccattattttcgtcgaggcgaacctgcacgtcggcccctcgcgctcgagcacggacgcgacgttcaacaacccccgcattgacaagctcaacgaaaagctcgccgcgctcgccgacggcaagacgatcttctacatcgacatcaacgagctcttcgacgacgaaaacggcaacctgcgtgccgatgccagcggcgacagcacccatgtctacgccaagtacgacctggactggtgcgactggctgtgcacgaaggcgatcgtgcgttaaatccgaagaacaggcgaaggccagccggaaactgcttccgactggcctttgctgtgatggatcacatattccgttttttctccctcgacgcggtagcgcgcatcagcgcttgaggatgaaccacacaaacgcgccgcaggcaatgatcataccgccgccaactgctgcaaagatcatgtgactgcctcctttcccccaatgtcctgtccgtgtttcggacgggatctgtgaagatacttcattataaggaatctatgcgctaagtttccggaaaacagcggcccaaacgctgcgcagccgttaagaaggcggaaaagaatgcgcctgaggctgcaaagaccgtcgcgttcgcgcggacaatgtgctatgctgacagtggagccaagacggctgtccggaaagagggatgcttatgcagaaagtatggaagcgcatgccgcagtggctgcgtgatacggtcatgttcctttttatcatgggctgcgccgttgctgtgtgcgagctgctgtccgtctgctatgacgataataacccgtttgccacatccgtgttcattctggctgtggtgctcgtctcgcgcttcaccaccgggtattggcccggcattctggcgtcggccgtcggcgtggtgagcgtgaactacctgtttacatacccgtttcacgaattcaacctgacgatcgacggctatccgctgacgttcgcggttatgctggtcgtgagcgttctcgtgagcacgctcacgacgcagatcaagcggcaggagcagctgcgttacgaggcggaaagagaccgtatgcgcgccaatctcctgcgcagcgtgtcgcacgatatccgcacgccgctgacggccatcatgggcctgagcgcgaccgtggaggaaagcgagacgctcacggacgagggccgcggcatggtcgaggagatccaccagaacgcgcagtggctgctgcacctgtcggagaacatcctgtccgtcacgcgcttttgcgacgagggcgtcgtgatcgagaaatcggacgaggtcgtcgaggagatcgtcggcagcgcgatccggcgctttcgcaaaaattgcgataccgacattcccatcacggtctcaaagccggaagagatcctgctcgcgccgatggacgccacgctcatcgagcaggtgctgctcaacctgttggagaatgtcgccaagcacagcccgtcggcaacggaggtcttcatcgagatccgtgccgagggccgccgcgtctggctgaccgtggccgacaacggcgacggtatcccgccgcagctgctcggtgtactctttgacggctatctgccgctcggcgccgtggaggcgtccgaccgcagccgccacatgggcatcggcctgagcgtctgccgcgcgatcgtgcgcgcgcacggcggcgagatttatgcaagaaacaagatcgacggcggcgcggagttccgcttctggctgccggcggaggaggaatcgaacacatgatccgtgataaaatcatcatcgttgaggacgaccccggcatcagcaaatatctgcaggcggcgctgcgctcccatgagtatgacacgctgctcgcgcccgacggcaagaccgcgctggagatgatcgcctcgcactgcccggatctgctgctgctggatctcggcctgccggatatggacggcagcgagatcatccgctccgtgcgcgcctggagccggatgccgatcatcatcatctcggcccgcagcgcggagatcgacaaggcgtctgcgctcgacatgggcgcggatgactacctgaccaagcccttcggcacggtggagctgctcgcgcgcatccgcacggcgctgcgccacacgcgcaccgacggcacgagcgatggcctggccatgacgggggagtaccacgtcggcgacctgtgcatcgactacaataagcaccgcgtttttctcgccggcgaggacacgcacctgacgccgaacgagtacaagatcgtggcgctgctcggccggcacgccgggcaggtgctcacctataagtccatgatgaaggagctctgggggcccggcgtcggcggcgacaacaagctcctgcgcgtgcacatggcgaacatccgccgcaagatcgagccgaacccggtcgaaccgcagtatatcttcacggaggtcggcgtcggctaccgcatggctgacagccactgaaccgagcataaacgtcataaagcgcccggagcgatcgctccgggcgcttttcgtgccctgccatgcgttcgtccgccgtgcgtcacagcgcgggaggcaggcgcgtgccgaaacggcgtccgtttctcgaacgtgggcaaaaagatcctcgcccgcagatgtgcggacgaggatcttgcctgtgatcccggaattatttgcccagctcggcgatcattttgctgcggatgccttcggtgagggcgttcgtttttgtggccttgaccgtttcggccgggatgacctcgcggatgctgagatacacgtgcgtgcgccgccaggggacgttgtgcgcgatgcgctccgtgccctcgatggtcgcaacgacgatggggacattggccttctgcgcgatcttgagcgagccggcgtgccagggcagcagctcgccgcttttgctgcgcgtgccctcgggatagatggcgaacgagcactcatgcgcgcggatgaggtcggccgcggcgttgatcgtggtcagagcgttgcgcgcgttctcgcggtcgatcggcagaaagcagcaccggcgcacgaacgggccgatgacgaacttgcgcatgttcgacggcttggacacgaacgccagccgccagcgccgcagcacccaccactgcaccatggggtcaaagttcgagcgatggttgctcacgaacagatattctgtgtccgtcggcactttttcgagccccgtgacgtggatcttcacgcggcagagcgcaagaatccagccgtcgagcgccatcgtcagcgcgtgataaaacgggctgatgtgcgtgtacattttgttcggtccggcgaaccacgtgcagacaaacatcagcagcacgtacacaagattcgctgccacgaagcaggcaatcaggatcggcagcagccaccagtagctcagcgcgggggacaaaaaataaatccacgcggtgctgagcacagcgggaatgagcagcagataatagagcatgaacgggcaccttcaagcatattaaatattaaaatattgccaataatcattgacgataaacttccaaatctattataattgcatcggaataccgtgtcaatgaacgagatgtaaacttgcgcggattccgaacacattctgattggagataggatgggataagatgatcgtattaaaatgggtgttcccggtgtccctggcggtgctcgccattgtgcacctcgtcagctgctggcgcggcgatgacgacctgcgcaagccgacgaaggtcgcgctgatgccggtcgttgcgctgagctacctcgcctttgcccgccagccgtcgctttgggtggtcgccggcctgctgtttggctgcctgggcgatctgtttttgctctggccgctcaagaagaagttctttgcgctcggcacgtcgtcgttcttcctgggccacgtgtgctacctgatctttatctacacgcactatgtcatccgcgtcagctggatctggatcgtcgtggtctgcgtgatctatgccgccggtgccgcgttcgtgtacgccaacagccgcaggagcatcccgcgcgcgctgcgtccgctggcgctggcgtatatgctcatgctctgcgtgctgagcgtgagcctgatcctgccgctgctgacggcgttctggtggggcaagctcgtggcgtttttcggcgcgacgttcttcctcgcgtccgacggtgtgctgtgcgacatgctcttcgtcaagaaggctgagcccacgcagcagaactttgttgtcatgtgcacgtacatccttgcgcagacgctgctggccatcggctttgcggcctgcccgtgattgttaaaaatctaggcatttcaaagggaaacgggactctccgccaccggagagtcccgttttatgtacagcggtggaaaaatcttaaaaaatttgctattttctctttacaccgggaagaaaatgcaatacaatgcgtagcatctacaggaggttttttcggggggaaaaagaatatggcaaaagaaaaggaaacggaaaaccggtcggaacgggagcggtttcttgactgcatgctcaaagagatcctcagcgggcggcgcaatccgggcgaccggctgccgacggagagtgagctggccgagcagtacggcctgcgcaagacgaacgtgcatcttggcctgcaggagctggagcgcctgggctttctgaaggtcgtgccccggcacgcgacctatgtcgcgccttactgggagcaggcgaacctggagacgctggccgccatcatgacgcacggcggcaaaccgcagccggagctggtggatgcgtttctggagctgcgcgaaatggtcgcgctcggctggttccgctggacgggccgcaaccccaaaacggagcagatgcggcacctgtacgggctgctcgagcggatggaggccatcgcctacgcgccggacggagagaaggataatccgaaatttctggatctggtcaatcagtttctggtgtgcatgtttgccgagtcggacaacatgatcttccgcgtcctgctgcgctcgtcgcgcgagcttgcgcacgtgacgtattacatcgtggcgtacacgctggatacgcaggagctgtgcaagacttaccgcacggtgctcgacgggctgacaagcgggcacgcatccgaggcgatcgactactggtgcggctggagcgacagggtcacggtgcagtaccgcgaggcgctgctgcagctcggaagcgaatgacccatgctttttaccccggggggaccaatgtcccgccggggtaaaagcgttatttgtgaacttttcgcgccgcggttgcgctcggcgtgcgcttgtgttaaaatcagggaaagaaaaccggaagggagcgagcacatgaagctgacatttatccgcgccgaccacgaggtgaccggcagctgcaccctgctcgagatcggcgggcactacggcctgatcgactgcggcatggagcaggggcgcgatctgttcgagaatatcgccattcccgtcccggcggcacagatcgagttcgtgctcgtcacgcacgcgcacatggatcacaccggccacctgccgctgctgtataagcagggctttcgcggcacggtctacgccacggaggcaacgtgcgacctgtgcggtatcatgctgcgcgacgcggcgcacattcagatgtccgaggccgagtggaaggggcgcaaggccgcccgcgccggccagccggcgcccgagccgctgtatacgctcgaggatgtggagggcgtgctgcgcctgctgcgcccgtgcggctacggcaagcgcatccaggtcggcgagaacatcattatccgcttcacggatgtcggccacctgcttggcagcgcgtgcatcgaggcgtggctcaccgagggcggcacggaaaagaagatcgtcttttccggcgatatcggcaacaccgaccagcccatcatccgcgatccgcagaccgtctcgggcgcggactacgtgctcatcgagtcgacttacggtgaccgcagccacggcccgcgcgtggactatctgaccgcgctcgcggactgcatccagcgcacgctcgaccgcggcggcaatgtcgtcatcccgtcgttcgccgtcggccgcacgcaggagctgctgtatttcatccgccagatcaaggacgccggcatggtacacggccacccgcacttccccgtgtatgtggacagcccgctcgccaacgaggccacgcgcgtctttttgcagacggacacgagctttctcgacgacgaggcctgcgcgctcatccgcagcggcatcaacccgctgtattttgacgacctgcacaccgccgtcacgaaggaagactccatggcgctcaacaccgacaagacgccgaaggtcattctctcctcgagcgggatgtgcgacgccggccgcatccgccaccatctgaagtataacctctggcggccggagtgcacggtgctgttcgtgggctatcaggcagtcggcacgctcggccgcaagctgcacgacggcgccgagagtgtgaagatcttcggcgacgagatcgccgtgcacgccgagatcaccgtcctgcccggcgtgagcggccacgcggataagcaggggctgctgggctggatcaacgccatggagcaaaagcctgcgcacgtattcgtcaaccacggcgacgacgatgcgtgcacggcgttcgccgcctgcctgcgcgacgagtacggctacgacgcggacgcaccctacagcggcagcgaatttgacctcgctgccggcgcgtatacctatgttgctccgccgcggcccatccgccgcgacgagacgcgccaggctgccgcggccggaaagcgccgcgagagcccggcctacgcgcggctgcagcgcgcgctcggcgagctcacggccctcgtgcgccgctgcgccggatgcccgaacaagggcctgagcgcctttgccgaggagctcgagcggctcaccgcccgctggcgcgaccggctcgctccgtgagcggagatcgcgcatagacagaaaccgccctgccgggcctccggcagggcggttttgcgcttagatctttccgcgcgcgcggccgatcagatacatcccgaccgtgccgacgcccagcaggacgatgttcacgaccggcacgacgttcgtctgcagcgcgtcggtctcgaatgcgttctgcgccagaaacagcgctcctgccccggctgctgccgcgcacaggagcacgagcgcgggcgggttcttctgcgcgaacagccgcccgtcgcgtgagcacgccgcacgcaggcagttgaccgccagcgtcagcagcattgacacgagcacaaagtccggcagcacccacagcccgatcacgagcgcgccgaagcgctcgaccgcgtgaaacaggctcacattgcgcagcatggtgaaaaacgggtgggtgagctttgccgtcagctccgcgccgagaatgccgatcgcgaacgcgctcagcagcgtcacgagcacgcacatgcgcacgcaccaccacccggccgcgcgcccccggccgggtgcggccggcgtgtgcccgccggtgaacgcaccgaaaaacagcaccgccgccccgatgccgaacaccgtcagcccgctgcgcgccacgccggggagatcctgcgccgtcacgggcagcagattgttcacgttcagccccggcgccgcaaacaccagcaccagcgccagcacgagcatcagcagcggcagaaagatctctgaggcgcgaaagagcgccttggtgctcccgagcgcgccgcagaccgccatggtcaggatcgtcaccacgaacggccacggccggctcagcgggaacaccgcctcgatgaaccgctcggccccgatgcgcagcgcaaacgcactgtagagcagaaaccacagcgcgtagacgcccagcagcacgcgccccgcgaccggcccgagcgcgcgcagcgtgatctcgccgatgccctcacccggccgcccgcgatgcagaatgccctcgagcatccacgcgaacagcagcagcggcaccagcgccgccagcgcgcacagccatccgccgcagccggcctccgcggtcgtcttgcgcggcacgagatgcagcagcggcgagagcagcaccatcgtgcacagcgcgtagtactgccgccgcgtgagttgaagtcccgtcatgttccgcctcccgatgtgtcgatgccgtcgcgcaggtcgaatgtccggcccacgtcggcgctgaccgtcacgcgcaccggcacggcctgccagacggccggccagtcgtcgcggatggcggcccatctgcgcccgccgccgatggcgagcgcctgccccacgccgagaaagtccgcacccagcgcctgtgatacggcgatcacgtcctccgcccagccggtcacgagggcggcgagcgccgcgttgagctcgtcctgataggcctgcgccgtgatccggcgcggcacgcgcagctcggcgatactcgcgcgcagcttcagcgtcacgtccacgcgcgcgagcgcgccgtcgctgctccataccgggcgaaagcgcgtcttgcacgtgccgagcgtgagcatgacggtgctgccgtcgctgtcggtgacggcgagatcgccgtgcccggctacgccgaggagcatgctggccccgcgcgccgtctctggctcgatgctgccgacgtagtccccgtcgcggaagatcgcgtatcccgccggggcgagcgccagcttgccgccctcgtcctccggcgtgcgcacgcacgtcacagcgcccaccacggcgcagccgctgcccgcgagcgcgcgggcgatgtccgtgcaggagcaggcatggctcgtgccgtcgagcgcgatgtccttttccagcgccgcgagcgcttccgtcacgtcggccttgtcgtcgcccgtctccatgaccgcctgctgcgccgtgccgccgcgcacgatgaacagcggcgcgctcaggcgcatgtccgggtcgcgcgcgatgaagtccagcagcggcgcgagcccgcccgcggcggccgcctcctcgccgaggagcagatagctcgtctgtgcgtaaaacagctcggcgctcggcgtgcggtcctgcagctggtcgagcgccgcgagcatcgacacgccggactgcgtcatgcgcttcggcgcctcgttctcgcacgccttgcccgtcgccgcactcaggcacacgccctccggcgcgcggtctacgccgatcgtctggatcagcgccagatcctcgaccgggcggtaattgctcgagatcgcgccggtgctgcacccgctgcacagcatgcccgctgccagcagcagcgccagtgcccgtctgtgccgcatggaccatccctccttatattatatggtgtgccctatctttgccgccggcggtttgggctgtcgtattccggcgggcggaatttttcatccggctgcggccggcgcagcagcgtgcggaagatcgtcggccgttcgctgtccacgaatggggccatatacgccacgccgtcgctgtcgatcgtgcacagataccagatcacgagccccagcgccgccagaataccgaacaatcccgccagcgccgccgccagcaccaggcccagccgcagcagacgcacggcgttgctcagctcctggttcggcagcgtgtagcccgcgatgcccgcgagcgccaccacgatgatcgccaccgggctgaccaccttcgcgtccacggccgactggcccacgagcagcgccccgatgatcgacaccgtctggccgatcgagttcggcagccgcagcccggcctcctgcagcagctcgaaggcgatgagcatgaacaaaatgatcgtcggcacggaaaacggcacctgctgcttggcctggatgaccgacagcagcagcttcgccgggatcatctcctggtggtacatcgccacggccacgtacagtgctgggaatgtcagcgagatcgccagcgcgaagtaccgcagcacgatcagcgccgaggccagcagatagtggtgcgattcgtcctccggcgcatgcatcagcagccggaatgtcgtcggcagcaggtagcccatcggcagcccgtccaccagcaggcccacgcagccgtcgagcagctcaccggcgaacttgtccgggcgctccgtctggcccagctgcggcagcagcgcccgcggccgctgcgtcaggtacggctccaggtcgccgcggccgagcagcgcctgctcgtcgatggtgtcgagcttgtcaaggatgcgctgcacgcgcgcggggtcggcgatgccgtccacatacagcaccgccaccgtcgtctccgactgccggccgacgaccgtctgctgcagcttcagcgccggggtgtgcagcttgcgccgcacgagcgaggtgttgatgcgcagtgtctcgacgaaggcgtccttcgatccgctgacggatttctcgatcgtcggctccgacaccgcgcgcacgttcgccgtgcgcacctcgaacgtgacggccctgcgctgcgcgtcgaacacgagcgcgaccgagccattggtcagatccgagacgacgtcgtccatctccgtgcgcgtgcgcgtcgagcagctgtagaccgcgccctgctcgatccggcgcacggcctcgcgcgtagaggcgatgtccgccagacggccgccctccgtcagcggccgcagcacgtccgtggacacgtcgcccgccgagaccataccgtcaagccagcagacagtcaccgtcaggcggctctcgaggccaatgcgcacagcgcgcgcctcaaaatcatcgcagtcggaaaatatttttttcagctcgcccgccgtggccggcacgtcatactgcggctgcgggcgcggatgcggcccatcatcggcgccgcggtgaaagaagttggtttgcatattgcgtagtataaccggaaaaaaccacaatattttgtgccagaaaaaagggtaaaaacttttttacgaaaaagtgaaaaaagttgttgacaggcgtcgatttgggtggtatattagcaaagcgctcacggggagtgccaagaacaaaacaaacttccgaaaaaagtttgaaaaaagttcttgacaagtgaagccgtgtgtggtagtataaacaagctgtcgccgagaggcacagcggcgtgtaccttgtaaattaaacaatgtaagaacacaaaactgaaaaagttttgtagcttatgcaaaataagcaccagaaaagggttcttaacatcggagac

SEQ ID NO: 13968 - DNA, 8826 bp, Unknown
  gut microbiota DNA sequence
caatcggacggtgtaaaatccctctgaattagctatcacagcgtagtatcagatgggatttgaaatgctgaaaaaccttgtatttccaagcatttttaagcattagatgccacttcccgatgtcgtatcgggtctactcctaagcggcaggccactggttcgaatccagccgggggtgccagaaaaaaggaccttgcatatgccaggtccttttttgctttttgttttatggtatgccctttgcccagcccggatctttgaagatgctgcgtccgacgcgctcatcggctgcataccgatatcctttgcgccggacgggcttccggcagcactacctgctggactatgacgcctacgacacggtgggcaacacgcaaaaaagcaccctctcgggtgcttttttgcatgtttgccccggctcactcgccgagctttgcgagcatggcctcgcagacctcgtccatgtcgccgacgatgccgtaggtgcagtagttgaagatcgccgcctcgggatcggtgttcacggcgacgaccacgtccgcgtccgaaaagcccgtgacgtggttgaccgcgcccgacacgccgaacgacagcagcagcttcggcttgaccacggcgccggactgcccgatgacgagcttgaacggcagcacgccgcggtcaaacaccggacgcgtgcaggcgaccttgccgccgaggcgctcggccaggcggcggtagcgcggcagggcgtccgcccccttgatcgcgttgccgacgcagacgatcacgtccgcgtccgcgatgttcaggctctcgtcgagatcgtcggcgcggaaatcgagaatctcggtgcggatgtccgcgaccgggaagtcgatgtgctcctcggtgacctcgtgcgcacgcgcgccgcagggcacacacttgaacgtgcccgggcggatcgtgccgacctgcgggcgcgccaccggaacggtgatgacggccatcatcttgccgccgacagcaggctcaacgaactcgatgtccgtcgtcttgggatcccagacgagctcggtcgcgtccgaagtgcagccggtgccgaggcgcgcggcgaagcgcggcgcaaagtcgcgcccgttgatcgtgccgccgaccatgaccgccgtgggccggtacttccggcacaggacggtgaagaggttggtgtacgcatcgttattgaagtagtcatagcccgtgccggtcacgtggatgaccttgtccacgccgcagtcgagcacgcgctgcagctcgccgtccgagatgctgccgacgatgaccgcgacgagtttctcgccgctcgcatcgcagagcttgcgcgtttccgagcacagctcgagcgagaccggcagcacgctgtcgccgtcgcgctcgatgaagacccacatgtctttgtaatctgtcttattcactgcctgcacctcctcaaagcacgtccgcgatccgctcgaagagccggtccacgttcttttccgtgctgccctcgtcgatcatgctgcccttcgcgccgacctccggcgggtaggtgcgcggcactttcgtgggcgagccggggtcgccgatctgcgcggagtcgagccccgggatggtggccgcgctgtagaccgcaatgggcgcggtgcgcgaggccttccagcgcttcaggttcgggatgcgggggcggaagttcgccttctcgaccgtgagcaggcagggatacttcgcgcgcagcacctccgtgccgcgctcgaggtcgcgctcggccgtgatggtgtgcgcggccgtgtccacctcgacgatcttcgccgtcgaggagatctggctcgcgccgaagcgctcggccagctgcgagcccatctgcccggtcgcgccgtcgagcgactccttgccgcagaagatgaggtcaaacgcaccgagcagctttgccgcgctcgcaatgacgtagctcgtggcgagggtgtcggcgttggcaaacgcgcggtcagacagcagcacggcgcggtccgcgcccgcggcgaggcactcgcgcagcgcctccttggccatgtccggccccatcgtgatgacggtgaccgtgccgccgtgcgcctccttgacgcgtacggccgcctcaagcgcgttggcgtccagcggattgaggatcgccggcacgcccgcgcggatcaggctgcccgtgacggggtccatcttcacgaggttgatgtcgggcacctgcttgacgcaaacaagaatattcagcatgcttcagccctcctccacattggtgcagaccttgccggggttgaggatgcccttggggtcaaacacctgcttgatcgcctgcatgagcccgaacgccgtctcgccggcggactccaccaggtactgcttctttgcgtggccgatggcgtgctcgccggagacctgcccgccgaactcgatgcacttggcatagcatttgtccatgacggccttgctgcggcgcttgaactcgtcgagcgccatgtcgttggcgcagcagtagatgtgcaggttgccgtcgcccgcgtggccgaagttgcggatggtgatgccctccgccttgccggtggcgcgggtgtagacgagaaactccgcgatgcggtcgaccggcacgacgacgtccatctcgtcgagcagcttcgtgtccgcctcgatgacggtcaggaacgcgctgcgcgcggcccagacgtcctttttcaagccgtcggtccagacgacgagcgtgtcgtacgcgccgcactgctcggcaagcgcgccgaggcggtccatcttcgcggtcagttcggcctcgctgtcgccgacgagggtgacgaggatgtacgcgcccgcctctttgccgtccacgaccgtggggaagatggtgttgccggtgaatgccgccgaggaatcgacgatgtcgcgctccatgaactcgatcgactgcgggtcgaggttggccagcttgatcttcggcacggaggcgatggcggtctccacgtcggcaaacgggaggatgaggctcacgttcatttccggcttcgggatgagcttgagcgtcagctccgtgatgacgccaagcgtgccctccgagccgatcatcaggtgcagcaggctgtagccggagctggtcttgcacacggtcttgccgagctccatgactctgccgtcgggcagcaccacagtcatggccagcacatagtcgcgcgtgacgccgtacttcacggcgcgcatgccgcccgcgttcgtggacacgttgccgcccacggtcgcggtcttttcgcccgggtcgggcgggtacatcaggccgtgcgtgagcgcgtcggccgcgaggtcgcacagcagcacgccgggctggatgtgcacgacgaggttgttcatgtcataggagaggatcttgttcatgcgcgtcgtgcacagcaccacgccgccgcacagcggcacgcatccaccgacgaggcccgtgcccgcgccgcgcggcgtgacggggatgttgttgtcatagcacacgcgcagaattgcggacacttcctcggtgctctcggcctcgcagaccacctcggggtaatacttgccgtaaatgggcatttcgtcgtggctgaagtcgtccttcaccgcgtcgcctgcgaaaaagcgcttcgcgcccacgatggcctgaagctgcgcggcgatctccggcgtgacctgattgtatttcgtcatttctgacctccttatggattttcagcataacggatcgttcccgctgcggccgcagccgcaaagcaggagagtcattatagcataaagccggtggatattgtcaagcggcgccgggttttcccgcaaaactgtccggcaaaacgcaacttccgggtcaaaaactgtcacccggcgcaaggtttccggcgctttccccgccgcggcggatgccggggaccggcgggccgcggcgccgctcccccgctcccccgctcccccgcccggccgagcgcgcgccgtctcgacggtgaaaaagcggtcgacgagctggtttgcctgtacgcagctgaggtttggcgcatgattggcgaacgtgaccgcgccgtccggcgtcagcgtgacggtcaggtcgccggcggaatatttggcggcgttgctcaggatgttgtcaaacacgcgccgcagcgcgcaagagagcttccggcgtgatcctcaaacggcaagccgtctgtacaaaaaaccagcgcccattgcattcgcaatgggcgctgccgctttttggggtgattttctgtgtcttgctcaggcctgcgtgtcgccgcggtagagcatgcacacgatctggccgcgcgtgcatgcgtcgtccgggctgaaggtggtggcgctcgtgccgacggtcacgccgttggctgccgcccatgcaacagcatcggcgtagtaggcgtctgccgccacatccgcgaagctcaccgtgtcgctcacggccggtgcgccggctgcgttatacagcagcgtgacggcctgtgcgcgcgtgcatgtgtcgttcgggctgaaggtggtggcgctcgtgccggcggtcacgccgttggctgccgcccacttcaccgcgtcggtatagtaggcatcctcggccacatccgtgaacggaagcgccgtgccggacacatccggctcaccggccagacggtacaggaaggtgacaacctcggcacgggtgcaggtgctggcgggggcaaaggtggtctcggtcacgccgaccgtgatctgcggggcgctgaagtaggcccacttcacagcggcgtagagctcggtgtctgcggggacgtccgtgaacggaagcgccggaacggccgggatcttatcaacggggatctccgcgctgacggaagcgttttcgagcgtgatctggtagtcctggctgtagttggccttgcccggctcataggtgtagatcacgagtgcgagcttgtggccttccttgacggtgtagaggttcggctgcaggtagatggtgtagtcgtggttctcgccgaccttgagggcgaccttcgtgccggcggaggcggagtcatagccagcgccggggttgcagaggtccatccagccgcgcgcaatgatcttgtagctgacgtcggtggcgttgagctcggcgtagtcatagttgttcaggccgccgcccatccacgcgccgccggcggtgatggtcttgggcacatagctgccctgcgtgttgtaggccgggaacgtcgtgccctcgggcgcgatgtcgacgagcatggcgctgaccatgagcgcgtcgcggtcgatcagatcggcgccgtccggcagggacacggtcacagcgccgtcagcgctcgccgcgccaacgtagttgtcgtggtcaagggcgttcgtctcttcgccgacatagttgtcgtggtcgacggtgccgcgcgggctggtcgtctccggcgcgtcatagttatcagcgctggcggtgaagctcacggccacgctgcccttgatgacggtgtcggcgtcgacatccatggtgtacatggcgctcacgtcggtggagccggcggtcagcgcgtcacgccagtttctgcggttgatgccctgcgtggcgtagtcgctgttgatggtggtcgtgccggtgtcgtcggcgttggagagggcaatgctctcgtcggtcgtccagctgtcataggtgttccagacggaggcgtcgacattgctctgcgcggtgacggcggccatgttctcggcgccgttttccacgccgcacaggtagtggctgaaccagcggttgaggacgttgttgtagctctcgccgtcaatgtagaactcgaggttgccggcggggtagctcggggtcaggtgcgcatcctgatgcagcaggagcttaacgttcacgccggccttctgataggcctgatacatgaggtcaaattccttcgtgcgcacgttgtcgtcgttgaggccgtgcacgatcagcgccgggcacttgatgttttccgcgtcaagcgtgtagtcgcgggtcgcccagtgctcggagtagtcgccgttgctcttgagctgatcctgctggatctggtacatgtagttgccgtacttttcggcgatggtcgcgtagtcgtccggatcgaggtagcggccgttgcagtaccagccgagccgctcggagtagttgacgaggctgttggtggagatgccctgagagttggtgtactcataccagctcgcgatgccggcgacggggacgatggtctcaaggccggcgacgccggtcgttgccagaccgaactgcgtcgtgccggcgtaggagcggccggtcatgccgatcttgccgctcgaccagtcggccgagatggcgacgttgctggtcttgtcggtgtaggccacgcggtcgccgtgcagccattcgatcacgcacttgaacgcatcgatctccagatcggtgccgcaggtctcaaagccgtcggagcccttcgtgcccagaccgccgcactcgaccacggcaaagccgcgcacaagatagtagtcataccagttgaggtcctcgtagtcgtacatctgctcatacgggttccagtagtaccagtcggcactgtcggcagcagctgccgcgtccgcggtcgtggcggtgccggcgggcacgcgcttgtccggctggctgtagagcttggagatgtcatagctctcgctgccgaggttcttgccggggttcatgctctcgttgcagccggtgatgtacgggcgcgcctcgtagatggtggccgccttgtagttgccctccatcgctgcgcgcgggatctgcacgagcgccttgacgaggtcgagcttgccgtcgtcgtcggtgtcgtagttggtctcgacatagacgcagtagcggatgatgtcgctctcgtcgttgctgtagccctccgtgacctcgccggtcgtgtaggggaagatgggctgcgccataccgttcatgtacagcggctgcagcttgtcggcgtgcagcgcgtcatacatctggtcggcgaccgccttcatctggcggtaagccgcgagcgtgcagggcgcgtcggcgtcggtgtccgtgtcgatcatgcccatgctgcgggcctgagccagatagtcatccgggaacgagccgagctgctgctcggtcatgcccgtccacagcagcagtgcacgcactgcgtccgctacggtcagttccgtgttttcgcctgcgccgtcagggacgagcgcagtaccgttgatgtctgccagatcggcatacgtcacggcgggtgcgctgctgtcgttcacggcgagcgccgtgccgggcagaagcgacagcaccatgaccagcgtcagcagcagagtcaagattctcctcttcatgataagccttctttctgtatgagattggattcttcaccgccggagcagcaggagtgcgccgcagacggaaaaaatcttatgtgcagtttacgtctgaaatgtaagtttttcaattgacaaagcacacaaggtttttggtgaatttaatttcattattcgtcgtattattagcatattcatacatgaattattttggatacggttatatgcgcttattataggtctgaaaacccatatattccagcgtttttccagctttgcgggcaattgaggagaaacggcgctcattagtatttattcattcaattttttgttttattcgcacgcgggcagaaaaacaccgccgcagggaaaaccctgcggcggtgttttttacgttttgcaaagaagcagcaggtacagcggcagatgacggcgcgtgctttgcttgtcccagcgcctagtcagcgcctgccgccgtttgagcagccgctttttcagactgatttttgaactctgttttccgcgcatgtcatcaccgcggctttctgccgtcgttgtgatcgggggaagccacgactgacgctcgcgcttccggcttttccgcctgcaggagcgggttgtcgatgcgcgtgatcaccgcataccccaccacatgcgcgccttcctgcatcgggatccgttttccgacccacaggcaatgcggatacgcctcgggagaaaggaacgtgatcgttccgcgggccgacgcgcccggcggcacggagcccacatcataataatagtgaacgccggtcgtcagacaggtatcggtcagccgatgcgccgggcgatacccgtcacgggcggggcttttccgaacgtcattgaatgaaaaaaacgcctctacgtccggcgggcgctccggaacaggcgttactggaattcgttgtctcatctggtgcgttccctccgttctgctgacagaatatcctgcgacggaggccctgtcaagcgcaaaaaatccgcccgccgcaggcgttctgcccgcgggcgtctatcgttcgtttcctccggctgcctttttatgctatcatggaacaaaatccgcaaaagggaggggactcgagacatgaaaaaaacatggcataccatatttctgatcctgctgatctgtctggacgcggcgctgctgcttctgccgctgctgcccggttatcgcgcgctgttcgatatcggcccgtatcccggccggccgcccgcgttccgcttcctgaagctggccggttatgccctgtttttccctctgacggcatacggctgcggcaggctgctggcgcgcatccgcaccccccggctccgctggctgccggcggcggtctttgcgctgatcgccacggcgctggtctgcctgcacaacaacgagctgcacatgctctgccagctggacagcggctgggtacacgtgccgcatatgtatgaaaacctcgtgcgcacagacctgacttaccgcggcggcatcggcatcttccggtatgtgctcccgtgggccggtacctttctgctgtgcgttctggccggaacatacagcct

SEQ ID NO: 13969 - DNA, 47674 bp, Unknown
  gut microbiota DNA sequence
gggcgcatttcagacgagcgtttcacggagctgtcggcagactatgaagccgagcagaaagaactgaaagagagagccgccgctatccgggcagagctttccaaagcgcaggaagccacggtaaacgcagaaaagtttatgaatgttgtccgcaagtacaccagctttgaagaacttacccctacccttttgcgtgagtttgtggagaaaatcgttgtgcatgagtgcagctatgacgagaacggcacacgcagacaggacattgatatttattactctttcgttggcaaggtagacctgcccgaatgaccgcccgacctatccggcgcaatgcgcaaacgccggataggaacggcaaaattttttacacttctactacttctttatcacacatcagcaaaaatgcagcgggggtatcttcatgtctcgaagcggatgagcgtgcagagcgtgtcgccgctgtagacgcacacgaaggggccggtgtccgtcagggtgtatttgagcgtgacggcatccacgtccttgaccgccttcggatagaccaggcgaaagcccgtgaacgcatcgcgcggcacggtgtccggcagggcctcgagcgcaaagtcgagatacttcgtgttatgtacatggccgttgaagtcaatgtcgctgcggcgcaggggcagcgttttctccccgtcaaaggtatcgggcgcgcgcaggcgcggcgcggcggacgcgaacacgccgcgcgtctccggcagataggaccggaagcgctgctggtcgatgcggatgatcttctgcgcgcgcaggtcgaacaaaatgagccgcgactcggcgcacacgagctccgtgccgctctcgtccgcgagcgtatagtcgcggaagatgcgcccggtgggcacgctgtcgcgcacccaggtcgtgacgcgcaggggcgccttgctgtccggccggcgcacgatctggacgcgccagtcggtcagcacccaggtgatgccgttgcggctttcctcaatgatgtcgtcgcccgagctgtcggagtggcggctggccgtgttttcaaaaatgcgcaggatcgcttcataccccagcttgccgctggggtcgaaatcggcgacgcccggctgatatatctccgaaaaaaacataatgatcgctccgtaatcgtaaaattgtgtgccttcagacgcccggcaggcagccgtttgcgaacatccagctataggccagcgcccaggaaccgaagaggtccgtctcgtgcagggcgcgcacctgcgcgcgcgtataccacgccgactcgatctcctccatggggtcggcgctcgggcggaacgtcccctccgccgtgccgaaaacgcagaccgtgcgctcgtcgccgatgccgaccgtgcacgccgccggcggcagcacgtgcgtgatggccgtcaggcgcaggccggtctcctcgcgcagctcgcggcgggccgcctgctcgggcgtctcccccggctcgatgaggccgccgggcaggccgtagatgcgctggccgagctccatgcgaaactcgtggatgagcgcgatgtgctcgcgcgcagcgtccgtgagcaccatgacgaccgcgtccgtgcggtggtgctgcaggtgctcgagcgagtcgatattccggtcgcggctgaccatctcatacgtgcgcgggcagccggtgcggtcgatatagtgcaggtcgtagcggtgcaggaacgcgccgccgtccttcttttcaatgtcaacgaattgcaatgcgggtcgcctctctggtcatgatagcttaggataccacgttttgcgccggggtacaaccggaaatgataatagatcagccgctgtcctttgacagcggctgatctgttgggggaagaaagaaagggaggatgcggggcaggccgaccggccgcgcccagtatgaggataccacacctttcttaaaaaatcatgagtgtcagccggtctccggcagcggcacgatgccgtgcgcgagcttgagctgcagcacgcgcagcacgctcgcatcgagcgcatcggccgtgagcgtgccgtctgcgagcgcctgctccacggccgcgaccgcaccgggcacgtcgctgatctcaagcagcatgtcgttgccggcggcgagggcgcgcacggccttctccccgtcggtatactgcgcgagggcctgcatctgcagcccgtccgtgacgatgacgccgcggaaaccgaggtcatagcgcagcaggttcgtgacgagcttgtgcgagagggacgcgggcgcatcatccatcgtcggcacggtcaggtggccgaccatgaccatgtccgccccggcggcgatgccggagacgaagggcttgaggtcctcctgccgcagctgcgggagcgtcttatcgaccgtggcggcgccgttgtgcgagtccgtggccgtactgccgtggccggggaaatgcttcagacagcagatgaccccggcgtcacgaaagccgtgcacggcggcggagacgagcgtggccgcctcgtcataatcatcgctgtaggcgcggtcgccgatggcgttgctgcgcttgttcgtccagacatcggccacgggcgcaaagtcggtgttgaagccgtaggccgcgatgtcgtgcgcgagggtctgggcattgtcatacgcgccctgcgtgccgagactgcggtagctgtacatgctgtttaatttcgtcgtgccgacggtgttcatcaggcgcgcgacgcggccgccctcctcgtccacggtgacgagcggggccgtggcgcaggcagatgagagcgcggacgtgagcgcccggagctgctcgccggaggtcatgttgcccgccgagagcagaaagccgccgaccggatagtcgcgcagcgcggcggcgaggtcatccgtcatggccgtgacggtgccgccgtccgtgagcgtctcggggtgcacgatgagcagctggcagatcttctcacgcgtgctcatgccgtcgagcagcgtctgcgctgcatccttctggacggcagcggacgtgcggggcgtgggctcgggctgcgcggcggtctgcccgcgccggacgcatacgaccacgagcacgaccgccagtgccgtgagcacgagcaggtaaatggccgcgcgccaatttcgttttgcagttgtccaaaaatcacttcgtttcatgccgtcattttaccgcagcggcagcaaaaacgcaatgccatcccatcgacgcggcggacttgtttcgttcacaatttcgtgctataataatggacaaaatttcgggggcacgtgctcccagacaggaagtgctttcttttatgacaaaaattgatattttctccggttttctcggcgccggcaagaccacgctcatcaaaaaactgatcgccgaggcctacacgggcgaaaagatcgtgctgatcgaaaacgagttcggcgagatcgccatcgacggcggcttcctcaaggactccggcgtgcagatcaatgagatgaactccggctgcatctgctgcagcctcgtgggcgactttgccgacgcgctgcagaaggtgctcacccagtttcaccccgaccgcatcctcattgagccctcgggcgtcggcaagctgagcgacgtcatccgcgccgtgcagggcgtgcagtccgacgagctggtactcaacggcttcacgaccgtcgtggacgcgaacaagtgcaagatgtacatgaagaacttcggcgagtttttcaacaaccaggtcgagaacgcgagcgccatcatcctctcgcgtaccgagggtatccgccccgagaagctcgacgccgccgtggcgctgctgcgtgaaaagaacccgaccgccacgatcgtgaccacgccgtggacggagctggacggcaagcagatcctcgaaacgatggagcggcgcgacacgctgtccgccgagctcgagcacctcaaggccgaggccgccgaggaggacgacgaggacgagcacgagcaccatcaccaccatcacgatgatgacgagcacgaatgctgctgcggccatcaccatcaccatgacgacgatgatgacgatgaacacgagcacgagcatcatcatgaccacgacgagcatgaccacgagcatgacgagcatgaccatgaccactgctgcggccatcaccaccatcaccaccacgcggacgaggtgttcacgagctggggcaccgagacgccgcgcaaatacaccgacgacgagatccgcaccgcgctcgacgcgctcatcaacgagcaccgctacggcgtcgtgctgcgcgccaagggcatcgtgcctgcgaccgacggcggctggatccactttgactacgtgcccggcgaatccgacgtccgccgcggcagcgcacaggtcaccggccgcgtgtgcgtgatcgggtcgcacctggccgaggatgcactgaaggagctgttccacattggctgacacgaaacagcaggcgccggatctgccggtatacctgttcaccggctttctggaggccggcaagacgaaattcattcaggagacgctcgaggacgagcgctttcacaagggcgagcgcacgctgctgctgctgtgtgaagagggcgaggaagtctacgagccggacaagttctgcgccggcaacgtctttgtgcgcaacatcgacgaagaggccgacctcacggtcgagcacctgaaggcgctgcaggacgagatccgccccgagcgcgtgctcgtggagtacaacggcatgtggatgctcgactcactctacggcaacctgccggagggctgggcggtcgcgcaggaattcctgttttgcgacgcgacgtcgtttttgagctacaacgcgaatatgcgccagctcacggtggacaagctcaagagcgccgagctcgtcgtgctcaaccgctacaacgacagcatggaccgcatggagatgcaccgcgtcatccgcgccatctcccgccggtgcgacatcgcgtatgaatacaccgacggcaaggtcgtgtacgacgacattgaagatccgctgccgttcgaccttgacgccccggtcgtcgagatcgaggaccgcgacttcgccatctggtaccgcgacatgtccgaggagccgaagaagtacgacggcaagaccatcgaggtcaagtgccgctgcctcgtgcgcaagaacgtgccgaagggctgcttcatcgccgggcggcacatcatgacctgctgtgtgcaggacattcagttcgcgggcatcatctgtgtgtgggaccgcgccgacgagatccgcaacgacgagtgggccatcatcacggcccggctggactacaagttccaccgcgcctatggccgcaagggccccgtgttcacggtgcagtccgtgcaggaggtcgaaaagccggaagaaccggtggccacgttctattaaaccgcgaagaagcctcgcagagtttgccgcccgcaggcggcaaagaaaatgcaatcattttttccggcggcatgtacggcggaaaaaatacttttcaggctgcaagtgtggaatttgtgcgccatcggcgcgcaaattatgcgcgcagcagactgtaaaccttttgtcggaaaccccgaatggggttttcgacaagtgaaaaaaatcagccgcccggtgggcggctgatttttctatgccgaaattcagtttgccttgtcctcggccgtggacagcaggacgcggtcgttatcaaacgcctcgcccgccttggcggcgaaggcgtcgagcaggccctgcacggtcatgtccgcgcgctccgggccggagacatcaagcacgatgcggccggcgtccatcatgagcgtgcgcgtgccgagctcgagcgcctggtgcatattgtgcgtgatcatgaggcaggagatgctgcgctccgacacgacgctgcgcgtgagcgcgagcaccttatcggccgtgacggggtcgagcgcggccgtgtgctcgtcgagcagcagcagctcgggcgtaaccatggtggccatgagcagcgtcagcgcctggcgctggccgccggagagcaggccgacgggcgtgttcatgcggtcctccagccccatgtcgagctgggcgagcgcgtcacggaaaaagtcgcggtcgcggcgtgtcacgcggcggaaggacttatgcttttccggcgagcggaggtaggccacggcgaggttctcctcgatggtcatgtgcggcgcggtgcccttgagcggatcctggaacaggtggccgatgcggcggctgcgcttgtgcgacggcaggaacgtgatgtcccgcccatcgagcgtgatcgtgccggcgtcgacgtaaaacacaccggcgatggcattgaagagcgtgctcttgccagcgccgttcgagccgacgatggtggcaaactccccgtcggccagccggagcgagaggtcggacagggcgcgcttctcgttgacggtgccggcgttgaacgtcttggaaatatgggaaacttcaagcatcggtctcgtccccctttccggacagggcgcgcagcttgcgggcgttggacttgatcttcgccagatggacgtagtccttcatgttcggcgcggcgatggcgacggccacgatgacggcggacacgagcttgaaatactcggccgagatgttcagccgcagcgccagcgcgatgatgaagcggtagacgatgctgccgagcacgacgcagacgacgcgcttgcccacgctgccacggcggccggcaaagacctcgccgatgatgaggctcgccagcgcgatcgtgaccatgccggtgccgaggttgatgtcgcaaaacttgttgtattccccgatcaggcagccggacagcgccgtgagggcgttggccaggcacaggccgatcgtgatggtggctttcggattgatggaggaagcgctgaccatatccagactgtcgcccgtggcgcggatggacaggccgagggacgtgccgaaaaagcggatgagcacgagcacgatcacggccgcgatgagcgcgagcaggatcagccggctccactgcccgccgacaaggcccttgaagagcgaaaacaccgtgtcgaccccggtgatggacacgttggacgaaaagcccatgaccgcgaggttgatcgtgtagaggccggtgttcgagatgatgccggcgaggatgctctcaacgccgaggcgcgtctgcaaaaaggccgtaacgtagcccgagagcatgcccgccgccatggccgcgaacagcgcgaggatcgggtggccggcgatggtgagcatggcgcccacggcgcagccgagcgtgaagcacccgtccgtggacaggtcggcgatattcaggatggaaaagctgatgaacagtgccagcgcgacgaggccgtaaatgaggccgacctcgagcgccgtctgcaaaacggtcagcatggaactccctccttcgggatgtcagatatcagtcaaaattctgctgcgtggtcgtctcgagcacggagctgcacttgccgtcaaacgcctgcttgacagccgtgaggtcgtagccgagggcggcgcagctttcggtgttgatcatggcgatgccgttatcgaacgtggtcacgggcagcgtggcggggtctttgccgtcaacgagcacctgcacgaccatgtcggccgtgatcgtgccgagcttggtgtaatccacaccgtagccgacgaacgcgccgttgagggcgaaggagtccgcgccgcagtactgcgggatcttggcattgaggaacttctcatagatggcgagctcggcggtcatgatggtgttgtcggtcggggtgaagacggcgtcgaccttctcggcgatgagcgcatcgacggcagaggtgacttcatcggtggtggtgccggtcttttccacgcagcggatgcccttgccctcgaggtaggccttcgcgtcctcgatcggctgcttggaggaatcctcgctcttggagtagagcaggccaacggtcttggtgtccgggttctgggcgagcatcaggtcgagcaggcccttggtgttgagcgcgtcgctcgtgccggtgatgcggccgccgggcgcgtcgagcgaatcaacaatgccggcgccgacggggtcagacacggcggagaaaacgatggggatctcggtgtcctcggtagcggactgcatgatcttcacggccggcgttgcgatcgggacgatgaggtccacgcccttgctgacgagctcggcgccgatctggttaagcgtcgtgccgtcggcctggccgttgtagagcgtgtagtcgaacttcacgcccagctccgtggccttcgcgtcgagctcggcctcgatggccgcctcgatctggttgagggacgcatcgtccacaaactgcacgatgccgaccttataggtcttgccatcggccttgttgtcctcggtcttgctgccgcaggcggacaggcccatgagcgcggtgacggcgagcacgccgccgacgatcttctggaaagtctgattcatagtatattctccttctatattgaaagcggttggttttgaactgttcggatacggtctgacgcggcaaaaattctccggccgccacgccatcgtctggttttgcgggtcatctgcatccctcctgcggtaatttgagcaacaaaaaaagcctcgtccacgaaacggttccatccgtttcatgggacaagactgtaactcctgcggtgccacccatgttggcgctcatgcgcccactttgcacgtacgatcatacgctccgccggataacggccgcggccaccgtcgcccctcatgctgctgcaatcggtttgccctcacgagtccattcgccacccgtccgctgcagcgcttccaccgtccgctgctctctgaaagcttcgtgaatgggtactcctctcggtcatcggtttctcgatggtgttactctaccacttcccgcgccggattgcaagccccattttcacgaatctgcacccgtttttcgggaaatcttttgcgcattgcgcacaaacgtccctgaccggcggtcagggacgtttgcgtgtgtcaaactctgcgaggctgttggggctgtcagctgccgcagcgttaatttccggtgtagacgaaagcgttcggcagcgtgcgcccggcggtgagcgcggggttggagctgcgcatgatgtacttgcccttgtaccagatcatggcgctggtgccgccgtcgaggttcatggcctgcatgcagtcgtgcttggtcatgatggccgcgcagtccggcacgctgatgccgaccgacgtcgtgagccggccctcaacgagcagggcgatgatctcgccgtacttcgactggccgaggcaggcgcgcggctgcaggtcggagaagccgctgcgggcgttgacgaccgtctccccgtcgatgatcatggcgggcgagaactcgaccgcgtccgtcgtgtcgggcgagaccgaggaatcgctgtcgcggatgtagatgcggttgtccttatgcagctcgagacgcttgtagccatagcccatatggctgccgtaggacttgccgttgcacatggcgtagcccgcgagggtaccgccgttgccggtgccgcccgggtcgatgaagcccgagccggtcatgccgatgacgccgccgtgggcctcggcgatcttgccgcagacctggccgacgctgccgagcgtggacgcggcctgcagactcaggcgcgacgggtctttcataataacgagcacgccgcggtaagtgctgcctttcacgcgcgcgatgaggatcttgttgcgcgcgtcgatcgcaagcacctgctcgccctgtatggtgcggatgctggtgccgtcagccgtgagggcggacttgtcgatgttgatgcggctccagccggcggcgagggcgtcgggatgctccttgacatacgcctgcatgctcggcacattgacctcccagaagaggttgtaaaacgcgatctcttccttgctcatgccctcagtgttcgtgagcgtcgggttgcgggactcggactcgccttcgccccactcgctgttgatgccgatctgcgcctccctggcggcctccatttcggcgaggaccttgtcaatgacgctgcgtgggatgaacgccgtggccagccactggtggctgagcgtgttcatggccgtctggatataggccgtgcgccacttggcgatgaacggaatgtcggaatagaccgccgtcagatacaatccggccaggatggccagcacgaggaacaaaatgagcagccggcggccgaggctctttttcttcttcggctttttggcctttttcgccttgcggccgtgcttgccggccgcggccggggcggcctgcggcgggcggcggcgggcatccggcgcgctgcggcgcggccgggcagcgtcatccgtccactggctggcataagcctgctgcgccgtacgctgctgggccggacgctgctgggtcgggcgctgctgcgccggacgctgctgggccgggcgctgctgggccgggcgctgctgtgtcgggcgctgctgggccgggtgctgctgtgtcgggcgctgctgggcggtatcggaagcgggccgctgcgtgcccgtggggcgcggcggcgaggaaaacagcttcaagaggcgactcctcctttatgtacgggagattacgaagggcttgacggccgggcgcggaaaatgttccgcacgccgcgggaaaaacgggaaggcccgccgagcgagccttcccggaaacgtgcaggggtgcggccgctcagcaaagctgcgcgccggcgggcacgctgtcatcgagcatgagcaggttgagcttgccgtccttctcggccgagaggagcatgccgttggaggccatgcccatcatcttgcgcggcggcaggttcaggattgccacgacggtcttgccgacgagctcctcggggcggtagtacttggcgatgccggagaggatctgccggtcggtgccgctgccgtcgtcgagcgtgaagcacaggagcttatcggactttttcaccggctcgcacttgaggaccttgcacacgcgcatgtcgcacttggaaaagtcgtcaatcgtcacatccggcagcacaggcgcagacttcggcgcggcggccgcttccttcgcggccttgagtgcctcgagctcggcgagttccttggccatgtcgatgcgcgggaagagcgtctcgcccttgtgcaccgtgacgtccgcgggcagcacgccccagacggcggcattgtcccacgtggtctgctctgccgcggcgccgatctgcgtgaaggctttcgcgcagctgtcgggcatgaagggcagcagcagcgtgacggtgatgcgcagcgtctcgagcaggttatacagcaccgtggccaggcgcgcgcgcctgctctcgtccttggcgaggacccagggcgccgtctcgtcgatatacttattggcgcgggaaatgaccttgaacacctcgatgagcgcctgctgcgtgccgaaattgtccatatagccggcatacgtctcacgcagggaggatgccatggcgatgagctcatcgtcgagcgcatcgtgctcgcgctcggccgggagcgtgccgccgaagtacttgatgaccatggcgacggtgcggctcaggaggttgccgaggtcgttggcgaggtcggtattgatgcgggagatgagcagttcgttggagaagttgccgtcactgccaagcgggaactcgcgcaggaggtaatagcgcagcgcgtccacaccgtagcgctcggcgagcaagacggggtcgacgacgttgcccttcgacttcgacatcttgccgccgccgagcagcagccagccgtggccaaagaccttcttcggcaggggcatgcccatgctcatgagcatagccggccagatgatggagtggaagcgcacgatctccttgccgaccatgtgcacgtcggcgggccagaacttctcgtaatcgtcgtacttgtcgttcaggaagccgagggccgtgcagtagttgaacagcgcgtcgacccagacgtagacgacgtggccggggtcaaaatcgaccgggatgccccacgtgaagctcgtgcgcgacacgcacagatcttccaggccggggtcgatgaagtttttgatcatctcgttgacgcggctggcaggctcgaggaacgtgccgctgagcagcagctcgcgcacgggctcggcatacttcgacaggcggaagaagtacgcctcctcctcggcatagtgcacctcgcggccgcagtccgggcacttgccgtcgacgagctggctctcggtccagaagctctcgcacggcgtgcagtacatgccggaatacttgcccttatagatatcgcccttgtcgtacatcttcttgaagatgcgctgcacggcctcgacatgatagtcgtccgtcgtgcggatgaagcggtcgttggagatgttcatcagcttccacagcgcacgcacgccgccggggccttcgacgatgttgtccacgaactgcttgggcgtgacgccggcagcctcggccttctcctcgatcttctggccgtgctcgtccgtgccggtcaggaacatgacgtcatagccgcacatgcgcttgtagcgcgcgatcgcatcggtcgcaaccgtgcagtaggtgtggccgatgtgcagtttgtccgaagggtaataaattggggtcgtgatataaaactttcctttgctcatactgcattctcctctgtattagtcttcaccggcgtcaccggggtcgtagacggacggatatggcgtcggctgcggctgcggcgtgggggtgggcgtcggcttcggcgcggtgctgggggtgggcgtcggcttcggcgtggtgtcgtgcgaatggtaggtgctgttggcctcgagcgtatggctgatctgcttgccgtccttatcgtagaccgtgcggtaggtcgtggcgcgcaggccctcggacgtgtagctcatcttgacatagctgccgtccacatccgtgccccagatctcaaccgtgacgctgccgttttggacatacgccttgatctcgatcggatagtcgcggttgttcgtaaatttgaactccggcccgccccagctgaccgcggcgtccatgccgggctcgatataggccacggggaagtagtggcaggtgcgggtgttgatcttgaggttcgagaccatggcgcagtagtacagcgtggacgacacctggcagatgccgccgccgacctcctgcacgacctggccgttggaataagcgccggcctccttgaagccgttggccttcgtgcgctggccgacgacgtcgttatacgaaaacgtctggccgggctggagaatgacgccgttgatcttctcggcggcgagcttcacgttcgtgatgcggttgctgctgctgccggagagcgaggtggtcttcgtggcgagcttgtcggccaggaggtgctgctgcaggcgctcctgcgtcatctcgggctgcgtgagcgtggccgggatggtgacggtatcgccgttggcggccgcgtcccacaggggctgggcggcggccacgtcaaactggataccgaccttgctctcggtggcggactgggtctcggggtcgtagcctgcgttgaccgggtcgccgcagacggcgtcgtgcagctcctgcagcgtcatcttgtcatcgccgctcatgtcgaccgggtaggccgacgtgccgaacttgccggcgcggatgtcgctgagcacgcggtcggcgacggcggcggggtcgagcgtgatcatgctcgcgcccttgacgacgaggatggcgctgtgcgcctcgtcgatctcgatgctgccggcggagaggctgacgttgatctcggcggcctcgcgctcgatgcgcgtgcgcagggcgtcggcgtccatgtcggcaaggttgtccgaggcgacgtcatgccccttgaaggcgcagcgcagccacgtgaagaagttggtgaacacattgccgctgcggccgtaggcataggccgtctcggcggcggcatcgggcgtggcgtcaaagccgatctccgtcgcggtgacggtgatggaccggttgccggggaaggtcatggtgagcaccggggcgctcgtatcgtcccagccggcggcgcggatggcgtccgccgcggcggactgcgtcatgccgccgacgtccgtgccgcagacagagacgttcgggaaaatggcgctctttttcgccacgagcaccatgccgacggcacccgccgccacgaggacggccagcacgatgagcacgacgcgcacggcgatcctgccgccgcggccgcgcggttttttctctttgggcgccggctgctgccgggcgtcgggcgcgccgcggcgcgccggctgctcctgccggggcacgggcgggcgctggggcgccgcctgtttcggtgcggcggcgcggcgggcagccgcctcgctctgtgcggaacggttggcgccgctgcggtgtgccgagcgctcctgcgctgcgaaatccgccgcctcgcggcgggcggccgcgctgcgtttggaagtgttgccgttgagtttcatttactcgaatccctgtctttccctgtcaaaatcggattattcagatatgtattgcggaacgcttccgcctcgctgggcgggagcttggttcggggctgccgctcgatctgcggcttcatccacgggttgtgctcggccttgcgctcggtctgcgcctcgaggagcttgccgatgagcacgttcgagatgagaaagcccgccggcgtgaagtgccagcgctccccgtccgcgacggcccagccggaacggacgaacgtttccagctgctgcgcgatgccggaaaaatcgctgcggtacagccgcgcatactccgcgcgcgacacgccgtgcacggtgcgcatgccgagcatgagatactccgccgcgcgctcgaaatcgccgatggtctcgtactcgtcgatcatatcctcgccgtggaggacgcccgcgatgtagcggtcgaggtcgcgcacatagctgtagcgcgtgcggccgatgcacgagtgcgcgcccgggccgaagcccatatagtcgtcgagctgccagtacttcagattatgccgggattcatagcccggtatgctgaaattcgagatctcatactgttcatagccgtagcgccgcagctcatcgaccatgcacaggtacatgtccgcctgctcgtcgtccgacgggatgaggggcgaatccttcagctcgtacatgggcgtgccctcctcgagcttgagcccgtagccggagatgtgctccgggcgcagggcgatcgccttggcgagcgtgtccgcccagtcgctgcgggtctggctgggcaggccgtagatgagatcgaggctgacgttgtcaaacccggcaatgcgggcatttttcacggccatctccacctggtggaagctgtggcggcggccgatcattttcaggatatcattgttggccgactgcatgccgatgctcaggcggttgaagcccgccttgtgcagggcgcgcaggtcgtgcaggcggacgctgtccggattgacctcgaccgtcacctccgcgcgcttgagcaggcggccggtggccttgacggcgtcgagcagctcgatgaggcgcgccgcgccgtaaaagctcggcgtgccgccgccaaaatacaccgtgtcgatgtacgccggggcgatgcgcccggcgctctcttcgatgtgctcgagcagggcgtgctgatagtccgccatgcggtcggccgcgccggcgcaggaataaaaatcgcagtagccgcacttgctcgcgcaaaacgggatgtggatatagataccgagacgcggttccatagacagctccttacatggggatgccccggccgccggagtgcggcggccaggggggatagatcggatcagatgagcgtgcagacgagctcggaatacgcggccggatcctcaagcggctcgcccgcgatgagcagcgcctgcgcgtgcaggatcttggcgatgcgggcagccttgtccttgtcgccggcgtcgaacgcttccttcatggcctgataggcgtggtggttggcgttgagctcgagcacacggatggcgcggatatcggtcggcgcgccgggcatgctcttgaaataacgctccatctcgagcgtgacgccaccctccgtgctcaggcacacggcgctggacacgagcttattcgacaggcgcacggacgcgacctggtcgccgagcgtctccttgacgaagtcgagcagatccttgtcctcggcctgcttggcctcggtctccttcttctcttcctcggtctcgaggccgaggtcgtcggtcgcaatgttgcaaaacggcttgtcggcgtaggtcttcatggtgtcgacgaagtactcgtcgatctgcgaggtcatgcacaggacatcgtagcccttttcatgcagctgctcggcctgcggcaggctgagcagacgcttgacgttctcgccgcaggcgaagtagatcttcgtctgctcggcgggcatggcgtcgacatattccttgagagagacgagcttcgtctcgctcgtgtggtagagcagcaggtccttgatctcgtcgaccttgtcgcccgtctcggtgacggcgccggcacgcagcatcatgccgaaggcggcgtggaactgctcgtacttctcacggtcgttggtcatgagcttcgtcagctcggacttgatcttcttgccgaggttcgtggcgatgagcttgagctggcggtcgtgctggagcatctcacgcgagatgttcagcgacaggtcgggcgaatcgaccacgccgcgggcaaacgcatagcacggcggcaggaggtcggtgcacttgtccatgatcatgacgccggagctgtagagctcgagaccggggtcggattcgcgggtgaacatgttcgccggggccttggccgggatgaacagcagcgcgcggtaggagatcaggccctcggcgttgacgcggatgacggccagcgggtcgtccttgtcgtggaacttgtccttataaaacgcgatgcactcctcatccgtcgcttccttgcggctgcgctgccagatggggaccatgctgttgatggtctgctcctcggtcttcgtgaccatctccatcttcggctcgcccttttcgtccttctcgccggtgtcgacccagtcgctctgctcgacgtccatgacgatcggccagcggacatagtcggaatacttgcggatgagcatcatgagcttccagttttcgagataggtggagtacttctcgccggactcgtcttctttgatgtgcatgatgacgtccgtgccgacggtgtccttctcggtctcggtgatggtgtagccgtccgcgccggtgctgacccactggtaggccgtgtcgctgccgtaggcgcgggtgacgaccgtgaccttgtcggcgaccatgaacgcggaatagaagccgacgccgaactgaccgatgatgtcgatggcggcatcctcctgcgcgttctcgccgaggccgtccttgaacttcagcgagccgctgcgcgcgatgacgccgaggttgctgtcaagctcctccttcgtcatgccgatgccgttatccgacaccgtgatcgtgcgcgcgtccttatccggggtgacgcggatcttgaaatcgctgcgcgccatgcccacgttttcatccgtgagcgactggtagcagagcttgtcgatcgcgtccgaggcgttcgagatgatctcgcgcaggaagatctccttgtgcgtgtagatcgagttgatcatcatgtcgagcagttttttcgactcggccttgaattgtttctttgccatatctatgcctccaaaaattttattacaccttcagatccgcaccggcctgcatgcaacagcggcccacggtacagattttaatattatagcacatcggccgtttttttcaacacctgccgccagaataattgggattgtgctgcccgtttttcatggtataatagggtgttaagaaaaaaataagattctgtgaggtggcttccatgaacgatctgaaagacctgctcgatgcgcgcctgttcctgctggacatggacggcacgctctacctcggggacgatgtgttccccggcgcggtcgaattcatccacacgctggccgataccggacggcagtacatttacctgaccaacaactcctcgcgcgcgggcacggactacatcacgcgcctgcggcgtctgggcttcccgtgcgaggctgagaacgtgttcacctccggcatggcgacggcgctgtacctcaaccagcactacgcgggcaaacccgtgtacctcgtcggcacgcaagcgttccgccgcgagctgctcagctacggcatcccgctcgtggacgacggcgcggagatcgtcgtggccgggttcgacaccgagctcgtgtacgaaaagctcgacaaggccgtgcacttcctgcgccgcggtgcggccttcatcgccgccaaccccgactgggtctgccccatgccggccggcgaggtgctgcccgactgcgggagcatctgcgcactgctgaccgctgcctccggcgtgcagccgacctacatcggcaagccgaaccgcaacatggtcgacgtcatctcggcgcagaccggcgtgccgaacgcgcagatctgctgcgtgggcgaccggatctacaccgacatcgccgtggccgtgaatgcgggcgcgcagagcgtgctcgtcatgtccggcgagacggacgaggcgatcctcaaagcgtccgacgtgcagccgaaatacgtcctgcgcgacgtggcagagctggcgcagatcctgcgcggcggcgcaacggcgtaaaaaaattcaaaaaacgtttgaaaatcgcttgacatattcggacacaaatgttaggatgtgttcagtaaacatcgtttttgcaaatgatgttgcaaatccctcgtttgtgttctctcttccactttgcagcgtccgggtctgcatccgccgcggacgtgcaagcacaagcaaacaacagcagccacgccggcgaacgccggtgtggctgctgttgctttttcatcgtgtgtaaacgtgatacatgaggtactggcagaaaccaaaacgcttccacctcatccggcgagcacggctcgccgcctgctcctcaaggagaaggcgaacatcaagaataaccctctcagatatcggcgcggaaccatgcgccggggcggtagtgctcgaagatgacgatgtcataatcgcgctcgtgcgtccaggcgcggctcgtccagccggcgcgcgcggcgcccatggcctcacacaggcgcacgctcagcggcttcggcccgatcttgtaggcgatgaactgcgggcgggcgatcacgttcgtgagcacgtttccgacgatggcggccgcgggcttattgagcgccttgccgtagtccttcggcggctggctgagctggccgcgcaggatatcaggcgcgttgcgccggaaccacgcgacgatcgtggggtcaaagctctcgacgcagtacggcccgccgtaagtacgcagggcggcgagcgtcagcgcgcacaggcggcggttattgtgcccgcgcttgacctcgagcagcagcggcacgcggccgccgagcgcttcgagcgcctcggcaaaggtcgggatgacgcagtcggtatcgccgaggcgcagcgcgcgcagctcggcgagcgtgaaatcatcaatgacgcccggcacgccgcacatgcgctcgagcgtatcgtcgtggaacacgacgagctggtcgtccgccgtcaggtgcacgtccatctcgacggcgtagcccgcctcggccgcggcgcggaaggccgggagcgagttttccggcacggtgccgtcctcggtgtgcaggccgcggtgcgcataattgcggtacaaaaacggggctttctgcgcgcgcgtggcgcggcccggcgcgacgagaaacgcaaacgcacccgcgcaggcggcggccggtgcgacgatcttgcaggcagttttccaattcataacgagtcctcctttcggcggcgcggaccgccggtttgctttgtccttattaaacaacaatttctgcttttcgtcaaatgcctgttgaattgccgggcaaggtattgtagaatgagacaaatccgatagagactgatggaggtaaccctgtgaagctcaactacaagcgcaccatctgcgttggctttgcctttttcctgatctgcgccttctggcaggcgtatgacaacaccatcccgctgatcctgacgaacaagttcggcatgtcgcaggcgtggtccggcgtcatcatggcgctcgacaacattctggcgctgtttctgctgccgctgttcggcgcgatctccgacaagcacaccggcaggcgcggccgccgcacgccgttcatcgtcttcggcacgatcgtcgcggccatcgcgttcatcagcctgtcgctcgtcgacgatgcgcagctgaaaaacatcgacgcggccgccgccatcgacgatcccgccgcgctgcgcgtcgtgtaccagcaggaggccgaccgcacgctcaagacccccgacggcgagacgttcgtgctcgaggacacgttcaccgaggacgaatttgccgccatcacaagtcaggtcacaaacgccgagggcaagaccgtgacgaaccacgactacacgaactatgtcgtgcccgcgcgccaggcctatgcccaccagacgaccgtgcagcaccccggcgcgctcatcggctttatcgcgctgctgctcgtcgtgctcttggccatggccacgttccgctcccccgccgtcgcgctcatgcccgatgttaccatcaaaccgctgcgcagtaaggcgaatgccgtcatcaacctcatgggcactgccggcggtatcctcgtgctggccatcggcatggccttcgccacgagctccgtgcgcaactcgctcatgagctacacggcgtacttcgccgtgatcgcgggcatcatgctggtggcgctgctgatcttccgcctgacggtcaacgagccgaagttcgtgaccgagatgcaggccgacagcaagcgcttcggcatcgataacggcgacagtgacgacgcgcccgcagggtctggcaagctcggcaaggccgagcgccggtcgctcatcttcctgctgctgtcgatcgtgctgtggttcttcggctacaacgccgtgacgtcgaaatactccgtctacgcgagcaacatcctgcacaaggactacaacctcacgctcatgctcgcgcaggccgccgccatcgtggcgtacctgcccgtcggcatcgtcgcgtccaagatcggccgcaagaagaccatcctcggcggcgtcgtgatgctggccgtcgcgttcggcgtggccgcctttctcaacgccgagagccccacgatgctcatgaacgccatgttctgcctcgccggcatcggctgggccaccatcaacgtcaactcgttcccgatggtcgtggagatgtgctccggcagcgacgtcggccgctacaccggcttttactacacggccagcatggccgcacaggtcgtcacgccgatgttctccggtttcctgatggacaagctcggcatgaccgtgctcttcccctacgccgccatcttcgtggccggcgcgttcgtgacgatgctctttgtgcgccacggcgacagccgccccatccccgccaagggccttgaggcgctcgacgtggacgattgaccgaaattcacatttggaggatgcaaatactatggaacgtctgacccgcaaactgaaaaagggcggctactccgccaaccgtcactccgaggcccagctcaccgagcgccttgaccagctcaagggcgtgcacaaacagtggctgcaggacgtgtcggatatgatgaccggcatgaagcagagcgaggccgccgggcaggccggcgcgctcacgctcatgatgctgcaggcgggctacgccgcgatcgtgcgcatcggccgccggttcgagagcgcgtgccccgtcgagggcagcggcgacaacaccgccacggcgctcggcaagctcgaggatctgtacgagcagtgcgtgtccgagcttgaggacgtgaaggaagggctcgaggagtgccgcgagaacggcttcacggacgacctggcctatgacgagctgatggtgacgaagctcggcatctcgcagctcatcaaacagttcgacatcgccaccggctacgccgaaccggatccggagccgtatcagtaccagccgaaaacggacacaccggccgaatgagccgctgtcatatttcaagagaaagaaaaggagacccaccaacatgaaacgtacctttaccgccattgtctgcacgctgctgcttgtggccgtgctcgccggctgcggcagcaccaacccgtttgacgccgcggccaagaccttctccgacgagggcatgacgatcacgctcacgagcgacttcagcaagcagtccatggacggctacaccgtgtgctacgccgccaaaacggccgccgtgttcgccctgcacgagacgaacgatcagttcgccgccgccggactcaacgacgtgacgctcgagcagtacgccgcgctcgtcatgcagaacaacagcagccgcaaccccgtcgcgggcgacgacatcaacggctgcccgacgatcctctatgacttctacaacgaggataaggacgtcgagtaccgctacctcgccgtgatgtatcaggcggacgacggcttctggctcgtgcagtttgcgagcgcgaaggacgattttgacacctacgagccgagcttcgtggaggctgccaagagcgtcagcttcggcgcataagcgcagcggatccggcacaaaccggccggcagcgtgtttgctgccggccggtccggtttttgggcggatgcccatatggaaaggaggctgcgcgatggcagcggcgacagacgaacggctgatctatgagatcctctccgccgtgggcgagatcccggagggaaacgttgcgacctacgggcagatcgcgcggctgatcggccggccgaaaaacgcgcggctggtcggccgcgtgctcagccaggccgagcgctacggcgactatccgtgccaccgcgtggtggatcacagcgggcggctcgtgcccggctgggacgcgcaggcggcgctgctcgcgcgcgagggcgtgaccctgcgcgacgcgcagcacgtggacctgcggcgataccagtggcagtgcgaatgaaagcgcaaggccctccgcaccgggtggaacggaggggtttcagcgagtcaaaaaagcctcgcagaggtggcctcccgcaggcggcaaaaaagtgcaatcattttctctcacgacatgtgcgtgagagaaaatacttttcaggctgcaagtgtggactttgtgcgcagcagactgcaagccttttggcggaaaacctttatggttttccgccatacgcaaaaaacctccgtgccgagcggcacggaggtttttgactgtgtaagggtcgattacttgagttcgacagaagcgccgacttcctcgagcttcttcttgagctcctcggcctcgtccttggagacctgctccttgatggcgcaggggacgccctcgaccttcgccttggcttccgccaggcccaggttggtgatctcacggacggccttgatgaccttgatcttctgatcgccgaagccggtcagaacgacgtcaaactcggtcttctcctcggcggcagcagcagcgccggccaccggagcggcggcaacagcagcggcggcggaaacgccgaacacatcttcgatctcgtgcacgagctcggacagctcgaggacggacatagccttgatctcttcgatcatagcagtgactttttcgctagccatggtaattttcctcctaaatagttaagtgaagtggtcgccttattcggcggcgggagcttcggcctcggcaggtgcggcggcgccgcccatctgctcgacgacctggttcaggcagacggccagacccgtgatgggggccagcatcgtgcccaggaccttggagtacagcgcatccttgttctggagctgcgcgatctccgcgatctcagcgtcactgaggaccttgccctcgaggaacgcgcccttgacgatgaacttctcgtccttcgccatcttttcgctcatgtcgtggatcatgcggatcgggacgatcggatcggccgtgctggttgcgagcgaagtcgtaccattgagcagatcactcattgcctcgagaccaacgtccttgagcgcaaagcgggtcagggtgtttttgacgacggaatactccacgtcattctgacgcagctcggtgcgcagcttggtgtcttcatcgacggtgatgcccttgtaatcgacgaacacgccggcgctggcgcccttgagccgctcggccagagcagcgacgatcgcctgcttctcgctgagaacttttgcgttcggcatagtgtgatttcacctccgtgtgaaagatacacgcccaaaaaaatttccgcggccaaagccccggaaacagaaaaagaaacatcataatggatgcatcctcggcaggatttccgcggtcaagccacctgctgtctttggagcgctataatagaataccagatgcgcccgcgcgtgtcaagcatttttctcgcggcggcgcggtttttttaaaaggagatggcccccggaggagtaccggaggccatcgcaaaaaaatcccacaaaaaaacttttaccctaaactgctgcgattagtctagcataattttacacgtgtgtcaagccttttcgcggcgatccgcgccccggcggatgcggccgtcgcgccgctcaccagtccatgctcccgagcccctcgccgagcgacatgccgcagcggccgtggccgggatagagcgtgagcgcgggcggcagcgcgcgcagaaacggcacggtcctgtccatgagcacggcggcgtcgcccccgcgcaggcgcgtaatgacggcaaagcccggcacgagcgagtcgccgctgaaaaaggcgtccggcccgatgcggtagcacgcgctgccgcgcgaatggccgggcgtggcgtagccctcgaggtgcagcgcgccccagtcgagcgcgatgtgatcgccgaaggtcatgtccggggcatacgtctcggtcttgaggtgcaggccgcgcagaaagtcacgtgcctccgccccgcgcgacacgctcagcgccgcgagcagcacaggcgtcgtgttgccggggttgcgcagccagggggtgcagttttcctgccagagggtgcgcgccgagagcgcgcgctgcatccggccgaggccggagatgtggtcgatgtgctcatgcgtgagcacgatcagcgcgtgatacccctgcaggcgctgcatggtcgcctcgtccggccaggggtcgaggacgatcgcgtcgcgcccctgcgtgacgacgtacatattggaaccgatgggtggaaagggaatgcgttcgatctgcataggccgtcagtcctcccggggcagggcgagcagccggcggctgagcggcagctcggacgggaggctgttttccagcgtgacggcgccgtggctgccgccgcggacccagccgcggcgcacgagttggcgcagcgtttcgcgggcggtgccgtcgctgccgtcgtagagcgtaacattgccgccgagggcggcgcggatggcccggcgggcgaacgggaagtgcgtgcagccgagcacggccgcatccacgcggccggcatacgggccgagctgccgcgcgaggtaggccgtgagcgcgggggaatcgagctcgccccgctcgacgaactccaccagctccgggcacggcagcggcacgatctcggcgcagccggcgcagccggcgcactggtgcatgagcgcgacgaacttctcctcccgcagcgtcagcggcgtggccagcacgagcacgcgccggtggtgcgccacggcgggcttgagcgccggctcgatgccgatgacggggatgtccggaaaggcggcgcgcagcgggccaatggccgcgctcgtggccgtgttgcaggcgatgacggcggccttgatgccgcggtcatacagccggccgatgacatcctgcgtcaggcggcggacctccgcgaccgggcgcacgccgtagggggcgttggccgagtcgccgaaatagagaaagtcctcccccggcaggcgctgcacgagcgcgcgcaggacactgatgccgccgaggccggaatcaaacaccgcgatcggaagctccgtccgctccatggtacgccctccttcccgaatttcgtacagaatgtatctattgtaccacattcggcgcagttttcaagtcaggcgatggcgcgccgccgggcacgtccgtgcacagttggtgcgtgagcaggatggaaagcgtctggttgcaggcgatcatggacgcggcgacagccgtgcagagcagggcgccgaagggggtgatgcgccggctcatgcgcgcgatgcccgccctggccgtgtcgagcaggccggtggcctgaaagatgccagaataggccgccgaaagcatgaaaacatcccccggagcagacgctctgggggatgcgtttttgtacggcttacttgttccaggggttggccgggtcggggtccgtcgggtcccagccgcggttcgggctggagatgtccagccacggggcggacggcttcggcacggggagagacgaggcgttgtagatcgacaccgtggtgccgagcgggcagttgtcgtagatccacttggcgtccgccaccgtcaggcgcacgcagccgtgcgagcagaccgtgccgagctggttatacagccggtaggacaggtcgtttttattcgggctgttgtacggcgaggagtggaagagatagtttcctgtgatctgcgtgcagtactgcccccagcagccctgcagcggatgccaggctgccttgaacggcgtgcggaacgtgccgatcggcgtggtccggccggggccgcagacgaaggcgtgatggaggatggagtaattgccgctcttatcgagaccgtacacgagcaccgtgcactggttgcgcacgacctcgagcttgtacggatactgcgcgcgctggagctgcgcatactccgcgtccgtatagttgttgaccgggacgacgaacgtggtgcggatcacgtccgtgccgcacaggaagaggatctcgaccgtgtgccgggaaggcatgtcgcgcttccagacggactcttccacgtggaagcccggcgtgatggacttgccgtcgagcgtgtagtggcgcgtgggctgctgcacgccgtccacataccagatgagggtcgcctcgcccggtgtggtctgatattccgacgggaagtaacggtaggtcacgtacaggtcgacggctcggcattccggagagagcgcgggcacggggtcggtcacgaccttgccgacgccgcggagcatggggtcatactccgaagcggtcttgtcggcagcgagcgtgacggtgcagccgcgcgcgagcaggcgcacaaggccggcatggccggtgcctgcgaccgtcgtgtcctcagccgcgacggtgagcgtgtcgaccgtgccgccgacggtaacggtgccgttcgggtcggtacgcacgacgagcgtgccggtgatgttcatgccgccgaggtcacgcccggcagggccgccaaggtagagcgtgccggtgaaggcgtccgccgtcaggggcgcggcgccgttataaatgacgcggccggaggccgggagcgcagcggcatcggagcaaaactgcaggccgaggttatagagcatctgcgcgatctcagcgcgggtgatgctggccgtggggtacaggctgccgttatcgccgttgacaatgccggccttgaccaggccgcccaccttggcgaccgcccagctgccgacggacgaagcgtcccgaaacgcctgaatgtcggcggccgtaccgtcgggcacggcgaaggcgcgggcgatgacgaccatcgcctcctggcgcgtgatactgcggttcggccccatcgtgccgtcaccgtagccgttgaagatgttcatctgcgcggcggtgctcagctccgaatagtaccaggcggtggtgctgacatcggtaaaatgcgcaatgtccttgcccgccgtgcagccaaagacacgcacgagcatggcggccatctgggcgcgcgtggcgttgtcattcggcatcatgttgccgctgggatcgccgagcaggatacggtgatcgcaggcaaaatccagcgccgcctgataccacgggccggatggcgtcggtacgggcgaaggctcgggcgagggctcgggcgtcggctcgggcgaaggctcagagcttggttccgggctgggttcgggatcggtcgtgggcgtcggctccgttacggaggcggtgggctgcacggggtcaggctctgcggcgacgaccggcacgacggccagcgtcagcacgcacgcaagcacgagcagcagagacaaaaggcgtttgcgcatggttttctcctccctgttttcctgtggggtgtgcgataatctcattataccggacggcggtgatttttcaacatatttcccggcgatttcaacttttttaagtttttatgacatacaaaaagcagcgcgccggacagcacgctgcaagtttacataattcagtttacataattacagactcagcagctccgcaacgtcgtcctccccgtagacacggatgccgtgcgcggacaaaagcgccgcggtgacgccgtcgccgggcacacgtgtgccggtgaacgtgccgtcgtagatctcccctttgccgcacgaggggctgcgctgcttgagcagggcggccgtgcagccgaagcgctgcgcgagggcgagcgtctgctgcgcgccgcgggtgtaggcgtccgtgacgtcggcgccggtgcgcgcaacgacgcggctgcccagccgctcggacggggcgcgcggcgtcggcagaccgccgagctgctccgggcaggcgggcacgagtgtatgccgggccatcagttcgcgcaaaacgctgtcaggaaggcccttggacgcgccgtcataccggcaggcgacgccgagcaggcaggcactgacgagaacagtcatcgcgcgccacgctttccgcggctccacgtgaagccgaagatcatgccgagcacgccgcctgcgatgtgcgtgagctgggcgaggccggccgtgccggtgacggcctgaaagatctcgctgccgaggtagaggatgagcacaaggatgagcgtgagcgggatcgtgccggtgcgcatgccggcgaacgacgcgagcacgatgagcatgaacacgacgccggacgcgcccatgagcgcgctgttcgggaagaagaaccacagcaccagccccgtgacgagcgccgtgagcgcgatggcgagcaggatgcgcttgccgccgaagcgctcctccgccgtcgggccgacgacgagcagcatgacgatgttgctgcagtaggcagcaaaatccgggtggccgagcacgtgcaggaaaaagcgcggataggtcagccagtccgtcagcggcgagcggtagacgcaaaagaggttctgcgtcgtccagccgttggtgagcttgccgaggccgagcgcgagcaggctcagcagcgcgaacgtgaggatgacgggcgaattatacaggatcgtgatggagcgtttcttcataagtacctctcaaaaccaaacacgcgcaggtcgtccgggaccggcgcggtgatgtgcaggagctgcccagtgacgggctgcgtaagatcggccgcggccgaatgcagcgcggggcgcgcgagcagggacgcatcgccgccgtagagtgcatcgccgagcagcggatggccgagcgcggcgaagtggacgcggatctggtgcgtgcggccggtgcgcggcgtgacacgcaggagcgtgtacccgtcccgctcggcgagcacggtgtagtccgtgacggacggctggccgtccggtaatatggcgcggcgggtcgtgccgtcgtccgcgcgggcgatgggcaggtcgatcgtgccgcttaccggcaggccaacgccgcaggcaacggcgagatacgtgcgccggaagccgtcggtgtgcagcacgcggcgcagccggtcgtgcacatagccgctgcgggcgacgagcatgacgccggacgtgccgcggtcgagccggttgacggggtgaaaaacggcgtccgggccgagataggcggccagcgcgttggcgaccgtggggtcgccgcggtcgtatccgccgtgcacggccatgccggcgggcttattgagcgcgagcaggtcggcgtcttcatacaaaatgtccagcggcacggccacgggcgtgaagcggccgccggagcgcttgtcgtcgatgcgcacggtgagggtgtcccccgccgcgacgcggtcgacggtgcgggcgtgcgcgccgttgaggcagatgccgtccggcacggtcttgacgcgggcgatcgccccgtcggccatgcgcagttcacgccggagcaggctcctgaccgtgcggcctgcctgctccggcgtgacggtgagcgtcagccggcgcattcctgcgcggccagcgcggcggcgtatgcggcgcgggtgcggctgtcaaagcagaccatgcgcacgcgcgtgatctcgggatggtcggcgaggtaggccgtgatctcgcgcacggcgatctgcgccgcctgaggcagcgggaaatggtagatacccgtgctgatggacgggaaatcgaccgtatggcagccgttctcgctcgcaaggcgcaggcagttgcggtagcagctggccagcagctcgggctcgccgtgctgcccgtcgcgccagcgcgggccgggcgtgtggataacgtggcgcgccggcaggcggtagccgcgggtgatcttcgcctcgccggtgcggcagccgttgaggccgcggcactcgttgagcaggccggtgccggcggccatgtggatggccccgtccaccccgccgccgccgagcagcgagcagttggcggcgttgacgatggcgtcgacatccgacttcgtgatgtcgccctgaataatttccaaacggttcatgcgttgacctccctgtcgttgatggtgacggtgatgtgatcgtcctgcgcgtcgatgccgatgtctccggcggccttgcgccgggcgacgatggcggaagcgatggcgtcctccacgtcgcgctggatggtgcggcgcaggttgcgcgcgccgtaggtctcgctgtagcccttacggacgaggtagtcgatgacggcgggcgtccagtgcagggtcatgccgcgctcggccatggcagcgcgcacttcgtcgagcatgagggcggcgatggcgcggaagttttcctccgtgaggtggttaaagtagacgatctcgtcgatgcggttgagaaactccggacgcaggaactcattgagggcgcgctgcgcgcgctcgcggctctgatcgtccgtgctcaggccgaagccgagcgcgccggtgcgcgtgttgctgccggcgttcgtggtcatgatgatgaccgtgttttcaaaattcacggtgcggccctgcgcgtccgtgatgcggccgtcgtcgaggatctgcagcagcaggttcatgacgtccgggtgcgccttttcgatctcgtcgaagaggacgacggagtacgggcggcggcggatcttctccgtgagctggccggcctcgtcatagccgacgtagcccgggggcgagccgatcatgcgcgagacggaaaacttctccatatactccgacatatccagccggatgagcgactcgggcgcgtggaagagctcgtcggcgaggcgcttgaccagctccgtcttgccgacgccggtgccaccgacgaacagaaagctcacgggcttgcgcttggcctgcaggccgacgcggttgcgccggatggcggcgcagacggtgtcgatggcctgatcctggccgacgatgtgcgcgcgcagccggtcgccgagaccggcgagctgctcgaactcatcggcgcggatgctcgcggccgggatcttcgtccagagctcgatgatgcgcgcgaggttatccgccgtgagctccgggcggcccttggcgcgcagggcgtcgagctcggtctgcagctgcatctcgcggctgcgcagctcggcgatgcgctcgtagcggcggtcgagctcctgctcgtcatactcgtcgccggtcttcggcggcgcggaggcaagcagctcgcgctcgcgcgcgtagtcgccgatctccttttcgacctcgtccgcgcggatgaggtcggggtttttcaggttcacgtccgagcaggcctcgtcgatgaggtcgatggccttgtcgggcaggaagcggtcggtgatatagcgctcgctgagcacgacggccagacggcacatgtcgtccgggatgacgacgccgtggaagtcctcgtaatagcggcgcacgcccttgaggatctcgacgctgtcgtcgatgctcggctcggccaccgtgacgggctggaagcggcgctcgagggccgcgtctttttcaatgtgcttgcggtactcggcgaacgtcgtcgcgccgatgacctggatctcgccgcgcgagagcgccggcttgaggatgttggcagcgttcatgctgccctcggcgtcgcccgcgccgacgatgttgtgcacctcgtcgatgacgaggatgatgttgccgacgcggcggatctcctcgatgaggcccttcatgcggctctcgaactggccgcgaaactgcgtgcccgccacgagcgccgtgaggtcgagcaggtagacctgcttgtcgcgcagcttatagggcacgttgccctccgcgatgcgctgggcgaggccctcggcgatggccgtcttgccgacgccgggctcaccgatgaggcaggggttattcttctggcggcggttgaggatctggatgacgcgctcgagctcctcggcgcggccgaccatggcgtcgagcttgccgtcgcgcgcgcgctgcgtgaggtcgatgcagtaattattcaggaacttgagcttgcgcggggcagcgccgcgcttatcggccgcgctgccgtcggcgtgcggcggctcggacgcggcggcggcagcgtcctgtgccgggggcgggttctggttgaagaggcggttgagaaacgggaaggtcgcggtcttgccgtcatcctcgtcggtgtcggcatcggaagcgtcggcatccgcatcggccgcaccgtcgccgccgagcatgcccatgctgccgagcatttccgccacgtcgccggtgagattgtcgagatcggcgtccgagatgccgagcttttccatcatctcatcgacgggcttgatgtgcagctcgcgcgcgcagcgcaggcacaggccctcattgtgggactctccgttttcgattcgtgtgataaagatcaccgctacgtttttcttgcagcgggagcagagtgtaggctgcatagactggttctcctgttcgatagattccgtacgcgccggtcacacgcccacgccgagcgtgagcacgtcgatggcctgcagcgcttttgccagggcggtgtgcgcgagggtgtcgcggccgatgacgggcccggcaaactgcaatgcccagcacagcaggatgccgaagcacacgccgttgaccgcgccgaaggcggcgccgccaatgtcgttgagtttctcccggttcgggagctgaaaggccaggttcggcaggttgccgatcgcggccagaatgagcaaaatgagcaaaaagccgacggacgtgacgagcacgtagcacagccgcgcgcagtagacctgcgtcatggcggcgcgcagcgtgatgtcctgctcgtcgcgcatggcgagcgcggcgctggccatgcgccgcgccggccggccggtgacgccggcggcggcaaagcactgctcggcgtattcctgcgcggtgtcgggatgcgcggcgacccagtcctcgcccgagaggccggcgtcgttatccggcagctccgtggcgaccacgtcgagctggccctcaaagtacccgccggcaaacggctccgccaccggcaggagccggtcggaaaacaggcccgcgagcagcgccgcgccgtagagcgcgacgacgatggcggcaagctgcgcggcactgaggatcagcccgcggcggtagccgctccagacggcggccagaaaaatggcggcaagcaccactgtcaatacgatcttcatgggtgtatccctgttctttctctctagactgcgggggtcagaaggcgagcacctcggcgctcgagccgctcaggagcagcgccgcgccccggcgcagcagcaccgagcggcggacgccgagcaggttctgctcgacggacttgatctcatcgagctgctggttatagagcgtgagccggtcgctgtactgcacgagcacctgcttgccgttaaccgacaggctcgtgacggcgccggtggtctcgcacttaccgagttcgctgccggaggcattgaccgtgacgagctgctcggcgctgccggagcggtagcggctgagcgcgagggtgacaaagccgtcgccctcggcggcgtagtcatacagatacaggtcgccaaaggggtactcggcggtgagctttgcgttatcgtcaaagaaggccaggcgcgtctgcgacacgcagcagaccttgccgccgcgccagaagaggtcggcaaagagctcgtcggcgcacgcggcgctgccgcgctcgtcttcgctcgtgagcgcgaacgtgtgcacgacactgccggaatcctgcaggcagagcgcggcgagatacttcccgtccgggctcacggcggcgcgcacaaggtagcccgtgccggaataccagacatagacggccttgccggaggtgtcatacaccgtgacggcgcccttatagcccgcggcgtccgagcagacggcgagatagccgctgtcgctcaggtcggcgctgatgatctcgccggcgggctcgatatcggtcttattgcccttgaagtccgccacgcacagcgtcgtgccgccgatgtcataggcgcacacgcgctcgccgccgacggagatgcccggctgcgagagcgtgaagatctcgtgcaggacggtcttgccgttttcatcgagcagctgcaggccgctcgaggacacgaccgcaaggcggctgtccaccgtgcggaaggtgcggctggcgctggagtcgaacgtgtagggcgcgctgtcgtccagatagtcgctcgccgagccgggccggtcgcgcagcagcagatacaaaaacagcagcacggccagcacgcacaccgccacgatgacggtctgccgcagcctgggattgtgttttgggtggtcgttcatggacattcctcccctatccgccgggcggatgtggtgtcaggcctgattcatcatatcgccgacggcgccgtcgtaccacacgcggttgagatacagcccctgcgggggcatggtcggccctgtgagccgccggtcgcgcgtggccagcagcgccgggatggcctccggctcgatcttgccgtaggacgcatagaccatggtgccgacgatggcacgcaccatattatacaggaagccgtcggcgcagacggcgatggagatgagcgggccgtcgcgctcggcacggcaccagtgcaccgtgcgcacggtcgtgcgcgtctcgatgccgacggagcgcacggcggcaaagtcgtgcgtgccctcaaaggcgcggccggcgcgcgcgaggcgcgcaaaatccagcggctgcggataaaagcagacgcggtgctccaaaaacgcatcgcggatgcgggaattgtagatctgatagacgtattctttctggatgcacgagccgatggcattgaagtcctccggcgcggcaacggcatcgaccacggcaatgtccgccgggaggcgggcattgaccgcgaggggcacgcggtcgatcgggatcgtgcagtcggtgcggaaattggcgcagtagcgcttagcgtgcacgcccgcgtccgtgcggccgcagccgacgaccttgatcggctcgccgcagaccttcgtgagcgcgcgctcgagggtctcggcgacggtgacgtccgtcttctgcacctgccagccgtgataggccgtgccgtcatactgcaggcgcagggcgatgttgcgcctcacaggccgaacctcgccagcacgatgaccccggcaagcacgagtgcgctccagaccatggcaagcgtgtcgcgcgtgcaccaggtgagctgcttcatgcgcgtgcggccctcgtcgccgtgatagcagcggcactccatggccacggccagctcgtccgcgcggcggaatgccgacacgaacagcggcacgagcagcggcagcagcgcccgggcgcgctgaaagaggttgccggtctcaaaatcggcgccgcgcgctttctgcgcggacatgatcttgtcggtctcctcgatgagcgtggggatgaagcgcagggccatggacatcatcatgctcatctcgtgcacgggcactttgagctttttgagcgggccgaagaggatctccatcgcatcggtgagcgcgatgggcgacgtggtatacgtcagcaggaacgtgccagcgatgagcatcgtgatgcgcaggaccatgaacacggcgcgcacgaggccctcataggtgatggtgatcttccagaaggacacgagctcgcgcccgggcgtgaagaagatattgagcacggccgtgagcgcgatgatgatccacagcggcttgagcccgcggaggataactttcagcgggatgcgcgagagcgcgatgcacacgcccgtgacgatgagcatgacggcgtaggacacgtagctttgggccgtgaacagcgccgcgatatagacgatggtcagcaggaacttgcagcgcgggtcgagccggtgcacgatactgctgccggggaaaaactggccgagggtgacgtccttcagcatacgcccgcctccttcccgacggcgagcagcgcgtccgtaagctgctcgagcgtatagatcgacggcgggagcgcaacgccccggtcgcgcagcgcctgcgcgatgcgcgcactctgcggcacgtcaaggccgatatccagcagctcctgcgtgtgggcaaagacctccgccggcgcgccgtcgaaagcgacgtgcccggcgtgaaaaacgatgagccggtcggcgatgcgcgcggcgtcgtccatgctgtgcgtgacgagcaggacggccgagccggtctcgcgccggtaggcggcgatgttttcgagcacgccacggcagcccgcggggtcaaggccggccgtgggctcatcgaggatgagcacctgggggcgcatggcgatcacgccggcgatggcgatgcggcgcttctgcccgccggagagctcgagcggcgagcgctcgaagagcgactcgtccacaccggcaaagcgcgcggcctcgcacacgcgggcatcgacctcctccgtggagagtttggcgtttttcgggccgaaggcgatgtcctgatacaccgtctcctcaaagagctggtgctcgggatactgaaagacgaggccgacctgaaagcgcacgtcgcgcgtggcggccttgctgcggtggatgtcctccccgtcgaagagcacggtgccggacgtgggcgcgagcagaccgttgaggtgctggatgaacgtgctcttgccggagcccgtgtggccgatgatgcccacgaactgcccggcggggatggcgagatcaatatcgtcgatggcgactttttcaaaaggcgttccggcgctgtagacgtgccggagatgatccgcccggatgattggcgtcataatttcgtttcctttatctatcggtgaagatcggtggttacggtttcagagcggcagcgacggcgtccgcacagtcggacaccgtgagcgcgtcgagcggcacgtccatgccgtgcgcgcgcagcgcatgcagcagccggacggtgacgggcgcggtcaggccctcccgtttcagcagatcgacctgcgagaagacctgcttcggcgcaccgtcggcaacgacggcgccgttcgagagcacgatgacgcggtccgcgccgacgcactcttccatatggtgcgtgatgagcacgaccgtgatgccctgctcgcggcagagcttcgtggccgtgtcgatgacctcgcgccggccggccggatcgagcatggccgtcggctcgtcgagcacgatgcacttgggctgcatggcgatgacgcccgcgatggccacgcgctgcttttgcccgccggagagcaggtgcggcgcgtgcaggcgaaaatcatacatgccgacctgcttgagcgcggcatccacccgcgcgcgtatttcctgcggcgggacgccgaggttctcgggcgcgaaggccacgtcgtcctcgacgacgttggcgacgatctggttatcggggttctgaaagaccatgcccaccgtggcgcgcacgggcaggagattgttctcgtcggacgtgtccatgccgtcgacgtacaccttgccgccggtcggcagcaggatggcgttgaagtgcttggcgagcgtgctcttgccggagccgttgtgccccagcacagccacgaacgagccgcgcgcgatctcgagcgagaggtcgccgagcgtgggccgctcctcgccggggtaggtaaaggtcagatgttcggttcgtaagatcggttccatggtgttcctttccgctcagcgctcccagcggcaggccgccccgcacggcagcacgagaccggacgccgcgaccggcaggcccagctcctgcgattcactgcggccgccgaagcgccgggtgaaaatgctctccgagagatacgtgagcaccgacgggctcagacccgtggtgtaggaattgatgatgacaaagagcggatcgtccgacagcacgccggacaccagctccacaaacggccagaggttcgtctcgagcttccagacctcgccgcccggaccgcggccgtagctcggcgggtccatgatgacggcgtcatagcggtggccgcggcggatctcccgctcgacgaacttgccgcagtcgtccacgatccagcggatgggccggtcggccacgccggaggcggcggcgttttccttgccccaggcgaccatgcccctggcagcgtccacgtggcacacgctcgccccggcggacgcgcacgcgaccgtggccgcgcccgtgtagccgaagagattgagcaccgagaccgggcgaccggccgcgcggatcttcgccatggcgtaatcccagttggcggcctgctcggggaagatgcccgtgtgcttgaagttcatgggcttgacgcggaacgtcaggtcccggtagcggatgtcccagctcggcgggagggtgcgcttgtcccagctgccgccgccggtgtggctgcggctgtagcgcccgtcggccgtgcgccagcgggggtcggtgcgcggcgtgtcccagatggcctgggggtccgggcgcacgagggtatatttgccccagcgctcgagcttttcaccgcgtgaacagtcgagcaccgcaaagtcctgccaagaatccgaaatccacatagctgctcctcttgtccggcggagagaaccgtgcagttccagtgtgcgccggaatggtgatacttagacagtgtattatagcatcaagtgccgcaatggtcaatgtgtccttcgggtttgtcgaaaagaatttgcaaaacctacttaaccacacgaaaaacgcaatgcaaaaagtaaattgctttactttgcgctgtttttcttacataatagtagacaagaagcaaggtcgtagtaaattcttttcagtgagggagttggtgctgaccatgagcataggaaatcaaatatcagcaattcgtaatgagcagcaattaacgcaagaacagtttggtgagttattccatgttacaagacagacggtttcgaattgggaaaatgaaaagagttatccggatttacagattctcatagcaatgagcaatcaatttgatgtatcgcttgatacattactgaagggggattccaaaatggtaaaagctattgacaaggagcgcgtattgggaaaaataaagcatgagaaatcactcgtagacttctttacgggtgctggtacaggacttgttgcctcttgctttctctcgtcagcgtcaacaattaggactgtagtaatgattgttggctttgtcatgataggcattggttggtataaaagggctaaatccgataaagaagtgtttaagtatatggaggagcgcggacaggagtgactttatatgagcatttctctactgtgccattaaaaagatgcccctgtgaggattgacctcacaggggctttcttattttctcaggcgctgagagtgccgtttcgtagtgcctccaccagcagcagcacttgccatttggggatggtgtactcgttgccatccagcagcaacagccagtatacctgccgctccagtagcagggtcttgtccgcgttccatcgcttgatgccgacctcgtagacaccatctcccgacagctccacatcgaaccgtcggcctttcggtgtctttggcggccactggtattgcaggaacttgcgggcaaagcggtacttggggtctggacccatgatgcgggacacatagggatacgcccgcgtgttggggatatgcggcacgaatatggagtagccccagtaccaaatgtcatcgtcgtcctcacacagaggagcattatttctgtggctcgtgtccatcggagttgccctctgccacctacgactcaaaccccggcggcgtcagcttccgaaggatttccgccgcttcctcggcggtgtagtgattgtagaggcctgctgacggattactcttttcctcatagagtatgtttgcgatttcaaggttttcctcgtcacccatgttacgagccttgtttcgcaagcgtcccagttcacgaagctctacttcttcaacagagagctcaccagaaaggattgccttttgcctgtcgctgtaaaacggcgcgaagggtgccacatagtctggactatccttattcgtgtaaaggaaatgcggcgtaccttttttcataaaaacacctcctgtcatagaaaattctacaacaggaggtgcgtgctttgtagcacataactttgaaaatgcagtctttctttttttgatgctgaaagcacaatcattcacttatggaacgaccacgcttccttccctcaatcccacatcaaatcttagatatccgggccgtccagagggccggaattgtaaacaaatgataaagaatcgcccgccggagcaccggcgggcgattctgggtgggactcgtttgcgcgcgggcgcgctcagcggcggccgctgccgacgtggtcgcggtcgaattcatgcagcgtctcgcgcatctgcgcgcggcggcgggcctcctcggcctccatctgcgcgcggcggcggcgacggcgctcggcctcgatctgcttgcggcggcgcaccagccacagcacatagccgatgacggccagcacgacgagcagcagcacgacgagcacaatgggattcgtgaaaaaggcgcgcaggtggccgccgatgtacgcccccttcgacacggcgacatcgactgccgcgacaagcttgaccgtgccgtagaccgtgccgtcatacgacaccgtgagctcgccgacctcgtcccccgccttgacgggggcttcgagcggtttgccgtcgcgctcggaatagagcgtgacctgctgctcaaactgcggcgcgccgcccgcatcggccgacggcagcacggccgagatgctctgcgccgggcggacggtcacgctgtcactgtcgcgcccatagcgcacgggaacttcgcagatgaggtcgctcgcgctgacgatatcgcgccagccgtagttggcaaacacccagcggtaggccgtgagcgtgtcggaaaagctgccgaaatcggtcgtgccgttggcgcgggtcgtgcccttgccgccgagcacgacgcacagcaggcgcacgccgtccttctccgccgtggagatgaggcagtagcccgcggcatcggtgtggccagtcttgacgcccttggcgtattcgtaataatagccgcggtacatcggggactcgggattgatgaggccgttcgtgttcgagagcgtgcgctcgtcggacaggttcgtggccgggacggtgtgcttgaccgtgttgcagatcgtggcgaagagctcgtggctgagcgcttctttcgtgatgcggtagaggtcgtgcgccgtggtataatgatcgtcgttcggcaggccgtgggggttggcaaagtgcgtgcccgtgcagccgagggcctgcgcgcgctcgttcatgcgctgcacgaacgccgagatgctgccgcagacatactccgcgacgacgttgcacgcctcgttggccgaggagatcatggcacagtagagaaagtcctcaaacgtcatggtctcgccgaccttgatgtcggcattgctcgcgccctcgaccatgtcggcattgcagtcgtcataggcggtgacggtgtcgctcaagttcacgtcgccgcgctcgaccgcctcgaccgcgagcaggagcgtcatgatcttcgtcaggctcgcggggtaggctttggcgtcgatgttgcgggtatagtaatactggccgctgtcctcgtcggcgagcaggacgcagttggcctgcagcttttcatcgagcgcggacttgaccgcgtcgctgccgaaaacatacgacccctcctgcgcctggacagtgctctggggcacgccgtcggacgagacgtttgcggtgctctggggggtatcggccgaattgtctgcggtgtttttcgcggcggcggccgggaaagccgccgtcagcagcaggcagacgatgagcagcagcggcaaaatgcgatattttttcatatctttctccatagaactatgatataatggaatatccggccggagacggcgctgccgcgcggccgggacaaatggcagtgtcttgccccattataataattccggcggcgaaaagcaaatcatttccgcgaaaagacgcaaacggagggaccgcgatgaaaatactggttgtggacgacgaaaaaaccatcgtcaagggcatcaaattcaacctcgaaaacgagggctatcaggtggacgtgtgctatgacggcgagaccgccgtggacatggcgcgccgcggcgagtacgccgtgatcctgctcgacctcatgatgccgaagctcgacgggctcggcgcgtgccagcagatccggcagttttccaccgtgccgatcatcatgctcacggcccgcagcgaggacgcagacaagctcatcggctttgaatccggcgcggacgactatatcacgaagccgtttaacatcctcgagctcaaggcgcgcatccgcgcgctcattcgccgctcgagcatggcccccgccgccccggccgagccggacggcggcaagctcgtgcgcggccacatcgagatcgaccccgagcgccgcagcgcccgccgcttcggccagaacgtggagctgacgctcaaggagttcgacctcatcgagctgctcatgcgcaaccccggcaaagtctactcgcgcgagcagctgctcgacctcgtgtggggctacgactatcagggcgatatccgcaccgtggacgtgcacatccgccgcctgcgcgagaagctcgagcgcaaccccgccgcacccgaatacatcatcaccaagtggggcgtgggctactacttcgccgaggcctgacggatgaagcagcatccgtttcgcctccggctgccgcacaggctggtatcgagcgtgcagtttcgcttcgccgtgacgttcacgatcctcgtggcgatcctgctcgcgctcatgaacacctaccccacgcgcgcctcgcgcgacatcgtattcaccgaaaagcagagcgcgctgacaaaccgcgccgccgtcgtgtcgtcctccctgtcgttgctcgacaatctcacgccggacaacacccggcaggtgctcgccctgctcgacctgcgcgacctgacgcgcatcatcgtgaccgacagcgaggggctggccgtgtatgactccgcgagcgaaaacaacatccgcggcaaatacgtgctctaccccgagctcgtgcgcgcgctcgacggacaggccgtgttctactcgcactacacgaccggcgcgtttctcagccgcgcggccatgcccgtcatgaacagcggccggaccgtcggcgcggtgtacgtgtgcgagagcgacagcgagcgcgctgcgctcatcggcaacatccagcgccggctcgccacaatcacgatcggcatcggcgcggccgcgctcgtggtgctgtggttttccatcaagatgctcacgcggcgcatcacgcagctggccgacggcgtgcgcaccgtgcagagcggcgactacagcttccgcctgacgctctcggggcacgacgagctgaccgagctcgggcaggaattcaacaacctcaccgaacggctcgagacgaccgaggcccagcgccgccggttcgtctccgacgcatcgcacgagctcaagacgccgctggcgtccatccgcctgctgtcggacagcatctcccagagcgcggacatggacagcacgacgatgcgcgagttcgtggccgacatcggcagcgaggccgagcgcctgcagcgcacgaccgagaagctgctcgacctgtcgcggcgcgacgacggcgtgcagccggacgtgacgatcgtcgacctgcagcaggccgtgcacgggacgctgcacctgctgcgcccgctggccgaccggagcagcgtgacgatcacgtgcctcatgagcgagggcgtgaccgtgcgcgcgtccgaggacgacatttaccacatcgtctttaacctcgtcgaaaacgccatcaagtacaatcttccgggcggggacgtgaccgtgcgtgtcgagacgcgcggtgagcagagcatcctgtccgtggccgacaccggcatcggcatccccgaggccgaccggccgaacatcttcaaccgcttttaccgcgtggacaaggcccgctcgcgcgagcacggcggcagcggtctcggcctgtcgatcgtgcacgacgcggccgcgctctacggcggcgtcgtgaccgtggacggcgtggagccgcacggcacgcgctttaccgtgacgttcccgcgcgcggcggcgagcggcgcgccggagacgcaaaaggaggtgccggagacatgaagcgctggcttcccctgctgctgaccctcgcgctcgcgctcggctgcgcgggctgcgccaggcggcagaccgtgacggtataccgcatcgcaaaagagggcgctgccctcctgcagacggagacgatcaccgtgcccgacggcacggatccggtgcaggtgatgatcgacgcgctcggcgcggcgcccggcgacagcacgtgcttcaaccccgtgcgcgggtggctgacgctcggcggctaccgcatcgacgatgcgggcacgctctggctgacggtgacaagctccgacacggcgagcggcatcgtgcgcacgcaggcgctggcctgtctggtgctgtccggcacggcgctcgacggcgtgtcggccgtcggactggaagacacggacggcgacgcactgtacgccccgctgaccgcaaatgacctcgccctgaccgacccggccacggacgcacaatcctgaacgcagacccattcccacggaggtgtatttttcatgctcaacaacattgcccgcatccagcgcgcgctgacacaggcgcacctggacgccatcctactcaccgacgaaaacgaccgccggttcgccaccggcttcccgtcctcggacggcgccgtgatcgtgacggtgcaccaggcatttttcatcaccgacgcccgctacatcgaggccgcgcgcgccgcgctgaccggcatcgcccaggtgctgctgtgctcgcgcgaggcgccgatgcgcacgctcgtgcagggcatcctgcgcgaggcgaacgtgcagatcctcggcggcgaggagcagacaacgagctatgccgagttcacagcctatgagcagctcttcggcctgaagctgcagccggcgcagaacctgatccgcaacctgcgcgcggccaagcagccggaggagctggcgatgatgtatcaggcgcagcagatcacggacgagacgttcgcgcagatctgcactgtcatccgccccggcatgaccgagcgcgagatcgcggccgagctcatctaccgcatgctgcgtctcggcgcagagggcacgagctttgaccccatcgtgctcaccggcccggacacgagcatgccccacggcgtgcccggcgaccggcgcgtggccgcgggcgactttgtgacgatggactttggctgccgcaaaaacggctactgctcggacatgacgcgcaccgtcgccgtcggcatgccgagcgacgagatgcgcagcgtgtaccagatcgtgctcaatgcgcagctggccggcatcgccgcggcaaaggccggcgtgaccggcgagcgcgtggacggcgctgcgcgcaaggtcatcagcgacgcgggctacggcgcgtacttcggccacagcttcggccacagtctggggctcgacattcacgagcaccccattgccgcccccggcgtgcacgcgaagctgccggagcacaccgtcatctccgccgagccgggcatctatctgcccggaaaattcggcgtgcgcatcgaggacgtgatgcatctgacggccgacggcgcggaaattctcacccgaagcccgaaaaatctcatcattctgtaaatacccgcttgtcaaaccacgcaaaatcgtgtaaactatataagatttttgattctgatcattcttgaggaggattcctatatgattactgcaggcgatttccgcaacggcgttactttcgaaatggacggccaggtcatgcaggtcgtcgagttccagcacgtcaagcccggcaagggcgcggctttcgtgcgcaccaagatgaaaaacgtcatcaccggcgccgtgaccgagacgtccttcaaccccaccgccaagttcgagagcgccaccatcgaccgcaagacgatggagtacagctataacgacggcaacctttactacttcatggaccccgagacctacgagctcattcccatcgacgagagcgcgctcggcagcaacttccgcttcgtgaaggagaacatggagtgcgtcatcagctcctacaagggcaaggtgtttctggtcgagccgcccacgttcgtcgagctcgaagtgaccgacaccgatccgggcttcgccggcaacacggccaccaacgccaccaagcccgccaccctcgagaccggcgctgagatcaaggtgccgctgttcatcaaccccggcgaccgcatccgcgtcgacacccgcgtgggcgagtatctcgagcgcgcgaagggctgagaaacaacaagataggaaaaaggcgctgccgcggcagcgtcttttttgtttgcgggtgcgagcggagtgcggtgcatgggcggcagcgccggaagaaaccgcggcccttccacggcatccgtcgcggcgtaccgccgcgccaccttctcctcaggaagaaggcatcgccttgcggcgatgcgtgatctcatccgaggcgggtcttgccccctcgggctcccctgctgcgcaaacacatataaaatcatgcactatttccccgcaaggag

SEQ ID NO: 13970 - DNA, 3689 bp, Unknown
  gut microbiota DNA sequence
ctagagacctttcggtctacagcatttcgagtgctgcaccttcgaccactcggacaactctccgtgtctattttcgtccgggtttctttccagaaatttgctcaaaaattcgttggagagaaaacaggagagacggcaaaaaatattcgattttgagattttctgtgttgaggaatatcaaggagaatcagggggacgaaattcccagcttctgccgaaatttcgagtcagggccgttatgaccacttcgatacctatccatgaatgcgtttcacgaacgcacggatgattataaccaatcccgcgaaaaaaatcaagtatggcggtggaatttctgcaaattctgttgtatagtacttgcgtatgcgctaatatggcgcaaattctgcgcaaaaaggacaccatcaccgtggacgatatgaaaaaagaggccgaacgcgaggcgcgcaccatgtggcagttcgtgcgcacgtttctcaagtggctcgtgatcgcgggcgtgaccggcggcatcggcgggctggtcggctcggcctttcacctgagcgtgaactgggcggcggcgtttcgcgccgcgcacccgtggctgctgtggctgctgccaataggcggcctgctcatcgcggccatttaccgcctgaccaaaatggaaaacaagaacaccaacgccatcatcgacgccatccacttcggcgacaaggtgccgctgctgctcgtgccggcgatctatctgtcgaccgttattacgcacctgttcggcggcagcgccgggcgcgagggcgctgcgctgcagatcggcggcagcctcggctgctacgtcgggcagctgttccgcctcgatgaaaaggacatgcgcatcgccacgctctgcggcatgagcgccgtgttctcggccctgttcggcacgccgctgacggcgacgatcttcgcgctcgaggtcatcagcgtgggcgtgttttattactccgcgctcgtgccgtgcatcgtcgcgtcgctcgcggcgctcgcgatctcgaatgccttcggcatcgcgccgacgcacttcacgttcgcgctcacggccgtgccgaagctgctgcttctgcgcgtggcggcgctcgccgccgtgtgctcgctcatgagcatcctcttttgcgtgaccatgcacggcacggagcggctctttgccggccgcatccagaacccgtggctgcgcatcgccgccggcggcgcgatcgtggtcgtgctgacgctgctcgttgacacgggggactacaacggcgccggcatggacgtcatcacccgcgccatcgagggcgggcaggccgcgccggacgcatttttctggaagctgctgttcaccgctgtcaccatcggcagcgggttcaagggcggcgaggtcgtgccgacgtttttcatcggcgcgacgctcggctgtgtgctcggcggactgctcggcatcccggccggatttgccgcggcgctcggactcgtgtgcgtgttctgcggcgcggtcaactgcccgatcgcgtcgatcgtgctgagcatcgagctcttcggcgcggggcagctcgtgtactttgcactcgcgtgcggcatcgcctatatgctctcgggctacttcgggctctacagcagccagaagatcctttattccaagctgaggacggagtttatcaacatccacgcaaaataaaatgcaagcgccatgcccggacacggaacgtgtccgggcaattttgacgccgaaaaaaattatataatttgcgtataaatttatataaaaatgcttgacaaagttataaggcgggtgtacaatgcacaatgtaagaaaaaagaaagcggtgaccaaccgatgaagaaaactctatacagcctcatgctcaacgaggaggtcgtgcgcgagatcgaccgcatggcccaccgcatgggcacgaaccgctcggcactcatcaatcagatccttgccgactatacctcggtcgtgacgccggagcgccgcatcgagaacatcttccacgagatcgagcagctcgtcgcgccggcgcgcgacctggtgccgtttttcgcgccgcacacgacgagcatgtcgctcaagagcagcctggagtacaagtaccgcccgacggtcaagtacgaggtcgcgctctacggcgacaagcaggaggggctcggcgagctggccgtcatcttccgcacccagtcggcgcaactgctgcagagcatgacgcagtttttccgcctctggaagcagatcgaggacgcgcacctgtccggcgtggagccggattacgcgctgtacgacggcaagttcgtgcgcacgctctcgctgccgcccgatcacgactacacgagcgaggagattgcccgcgcgatctcggactacgtgcagctgtttgaccggctcatgaaggcatacctcgccgggaagtacaccccgcctgagatcgaggcgctctactgcgcgcagcagcagcgcgcggcgatcctcatctgatccattcgcaaccatccatgaaaggaggcgctgcgtgccggaacacgcagcaacccgactatgaacgctgataaattcacgcaaaagacaatcgaaaccatccagaccgcccagagcatggcgcaggaaaacggcaaccagtatctcacgccggagcacctgctctatgcgctcgttgacgccgacggcggcctgatcggtacgctgctcggccgcatgggcgtggactgcaacgccgtgctcagcgagctggacaccgccattgaccagctgccgaaggtctccggcggcagcggcgaggtgtacgcctcgccggaaacgagcaagatcttcaatttcgccgagcgcgaggccaaatccggcggcgacgcctacgtctccgtcgagcacctgatgctcggcatcttcgccaacgagaccgccgccatcaagcgcatcttcagcgcgcacggcatcacgaaggcgggctttgtggcggagctcaaaaaggtcaagaccggccccgtcacgagcgacaacccggaggacacctatgacgcgctgaaaaagtacggcaccgacctcgtcgagcgcgcccgcgaaggcaagatggacccggtcatcggtcgcgatcaggagatccgcaacgttatccgcatcctctcgcgcaaaacaaagaacaaccccgtgctcatcggcgagccgggcgtcggcaagacggccatcgccgaagggctggcgcagcgcatcgtgcgcggcgacgtgcccgagggcctgaaggacaagaccattttctcgctcgatatgggcgcgctggtcgcgggcgcaaagtaccgcggcgaattcgaggagcggctcaaggccgtgctcgaggaagtgcgcaagagcgaggggcgcatcctgctgttcatcgatgagctgcacaccatcgtcggcgcgggcaagaccgagggcagcatggacgccggcaacctgctcaagccgatgctcgcccgcggcgagctgcactgcatcggcgcgacgacgctcgacgagtaccgcaagtatatcgaaaaggatgccgcgctcgagcgccgcttccagcccgtgcaggtcgatgagccgacggtggaggacaccatctccatcctccgcggcctgaaagagcgctacgagatctaccacggcgtgcgcatccacgacaacgcgctcgtcgccgcggccacgctctccaaccgctatatcaccgaccgtt

SEQ ID NO: 13971 - DNA, 15505 bp, Unknown
  gut microbiota DNA sequence
tcgccttgcggcgatgcgtgatctcatccgaggcgggtcttgccccctcgggctcccctgctgcgcaaacacatataaaatcatgcactatttccccgcaaggagcaaggagaaggcttgaaaagaaccagcgcgccgggcaaagccggcgcgctggtcattttttctttcgcatccgcgttattcggcgctttccgtctccggggtctcggtctgcgctgcggcggcgttggccgcgttgacgtcatgatccagatccttgatgaagcagcggcggcgcttgtgctgctctttctcgagccgcttccactgcgcgaggatgtggtcattgagctcgagcatcgggccggtctcggcaaagcgcacgccgtggcggttgcagctctgacagacatgatccatcatgacggcattgatgccctcggtctgcagatcaggccgcacggccgtgagcagcatgatgagcgtgtcgctgtggtgcaggtcgttgagcacgcccgcccagccgaacgggaacaggcggccgtcggagtgcttgagcgcgaccgaggggtcaagcgccgtgacgccgaaggccacgagctgatcctgctcgtcaaccacgaagcagacaaagtccgggtctacgagcgggatgaacttgttggcatagcgctcgatctgctcgtccgagagctccacgacaccgtagagcggcgcataagccgcgttgaccagctcaaagacctggcggacaaacgggccgtactcgctcttgtggtgcacggtggccacgtgcaggtgcttgcgcttgaggatgaactccgagagcttgtgcaggcgctcggcctccgcgccgcccggttcgggcacggtgatgcggtactcgatccagtcaacatccttgcggtagccgagtcgggtgaggtgctcgagataatacggcgcgttgtagttggtgaaaaacaggcttcggcggtcaaagccctcgacgagcataccctcgcggtccatgtccgtgaagccgagcgggccgtgcacctggtcgcagcccttttcgcgcgcccagcgctcgaccgtgccgaacagcgccgccgagacctcggaatcatccacgaagtccacctggctgaagcgcatgcggtgcgtgccgaacttgtcattggccttgtggctgaggatcgcgccgatgcggccgacgatctctccgtcgcgccgggccagccagcaacgcgcctcgcaataatcaaacgcggggtttttgcccggcgtccagtccgagaggtcatcgccgtagaacgagggaatgtagtttggattatcggcatagagccgattgggatactgcataaactggcgcagctcgtgcttggtcgtgacctcggtcacgacgaccgggctgtgcttttcaaacttctgcatgagaatatgctccttacagcaacaatgaccagtgggatttggtctggcgatagtatagcgcgcatttcgccggatttcaacctctgcgtgcgtggttattcacccaatcggcacggttcgacacaaaaaatcccccggagcgatgctccgggggaccatttttcctgtttctgcttacaggagctcgggataccatttgtcgatcgcgtcaacgatcgcggcagccttgccctccttgcagatctccagaatgtcggatgcgaggccgaggccccagtggacgaatgcatttgcgttcatgctgctttacccctttcttgatgttccgccgccgcacacacttcggcgccggacagattggcggcaataccggttacaggtttattttaccggatccgcaccggatgtcaagcggacaaacagcgccatgtgcgcaattttccttaccgctttcttagcgcgttcctgacaggttttcgcggcttttcccgccgcgcggcttgcactgcgcaccggaatcggctataatgagcgttgcgcctggtttgtgtcaaaaaaaggcgcgaccatcgtgaggggggaacagcatatgcaatgccgcgaatgccatgcggagctgccgcagggcgcgcgccgctgcccgcagtgcgggcggccggtcctgcacgaaaagatctggaacaacaaacggctgcgtgcgctgctcatcggcatcaccatcgtgctcatcgccgtcggcgcgggattcgccgtcgtcgcctcgcaggacgcggccgtgaacagccgcgtcaaggacgcgatctgcaacttccagtttgacaccgccgagaccctgcgcggcgacgtcaagctctttcccgccggggacaatagcctgcgcacggagatcatccgaaccggccggctctatcaggccgggcagtacacgcaggcgctcatgtatctcgacgatctgcgcgagacctacaccgacgcaggccttgcggcctacagcggcgtgctcgacaccatagaggccaagagcctgccgcagatctacgccgcggccgcggaggcctacagcgcgcaggattaccagaccgcgctggcagactacaccgtgctcgccgcgcgcaattattccgacagcgacaagcgcctgtttctcaccaacgcccacctgtgcgacagcctgggccagcttgcgctcgcgtccggcatgaccaacgcgcaggccgcgcagaagctcatggagctcatcggcttttccgacaccaatcaggttatcatgtgcgacgacagctacgcgcaggcgtttttgaccggaagctggagcagcgacgcgggcgaactgaccgttgccgacgacggcacggtgacctgctccctgcccggcctgagcgggaaggaatgcaccctgcgcgatggcgccatctacgccggaacgggcgaagacgccgtggcgttttaccgcttttccgtgctcagcgaccgtatgatgatcgccgacgccgtcggcgacggccgtgcttacaccatgttccggcaataaacaccgcacattttctgccccgcagcgcccatgggcgctgcggggcatttttttgccgggcctgaacaggcggattgaaattgctccttgctatttccatttttcatacgtataataaaattggttgtatctgaacttgcagaccgacaaaaatgggaggagaaagaacatgaaaaagcgcatcatcagcctgctgctgtgtctggtgctgaccgtgtcgctcgtgccggccgccgccgcggcggacacgggggacgccaggaccgtcacagtacgctacgcttccggtcacgggatcgacacccacgactatgaagcggcctttacgtacagcgacgatctgttcacccggagcggctacacgtaccgcaaggatctcgcgctgatgtccatgggcctcgcgttcgcggcctatacgagcaaggactccgaaaagacggacaactacgccaccggcaaccgcaacttcgtgtccatggccgagcagtgcggctttgagaatatccagtcgaacaaatggatgttccagcccgccgaggccgactccatcggcatcagctgcgccagcaagaccatccgcgacaacggcggcagctacacgctcatcgccgtcggcgtgcgcggcaacaactaccacgccgagtggggcggcaacgcccggctcgatgctgcgggcgagcataagggcttcgccctcggccgcgaccaggtgctcgactacctgcgcggctacatcgccgacaccggcatctccggccgggtgaagatctggatcgcgggctacagccgcggcgcagccgtgtccaatatggtcggcggcgcgctcgacaacggttacagcctcggcgcgggcgtcagcctcagcccgcacgacctgtactgctactgctatgagccgcccatgggcgcgatgaaagagcaggtgcagggccgcgtgtatgacaacatccagaatctcgtcaatgaaaacgacctcgtgacctacgtcgcgttcgacaactgggacttcgcccgctacggcgtcgaccgcgtcgtgccgaccaagggcgacgacaactacctcacctacaaggccgccatgctcagggaattcgtgaagatcccgaacaacggcggcatctactggcccgactacttccaggcctggggcattgacccgaaggacatcacgagcggcgatctgggcaagatcttcaaggtcaacatgacgcagaaggaattctacgccgacctctgcgaggcgatcacgacgtgcctcgcctcctcacgcgaagactatgcggagaacatgcaggacttccttgtggccctgctggcggatattttcggtgcggccgataaggacacctccggcgtggccgaggacttcgccaaaaaggtgcaggacaactggaagaagctcttctactcgctgaccatccccggcatgatcaaaaacggcacggccgccaagctcctgaccggctatctggtcgaggcgctgcaggaaaacggcgttctgacctacgaccttgcgggcatcgaggccgcgatgggcatgctcgcgccgcgcctgtcgaaaatggcgctcaaataccccggcacgacgatgacgctgctggcaaacctgctcgtgatcgggctggcccactgcggcgagccgggcctcgcctggctgcgcagcctgccggacgactacatgaccagcaagcagaccgtaagctacacgggcctgtttgacgacgtggctgcggacgcatggtatgcccccgccgtggactacgtcaagtacggccggatcatgaacggcatgggcagcaaccgcttccagcccaacacacagatgacgcgcgccatgttcgcgcaggtgctctacgcgctcgagggcgcgccgtccgtgcgcggcctgagctgcccgtttaccgacgcgggcggcagctggtacaccgacgccgtcatctgggcgtacaacgcgggcgtggtcgccggcgtgtccccgacgcggtttgcgccgaacgaagcgctgacccgcgagcagatggtgaccatgctctacggctacgccggccgcgagcaggcgctcagcggcccggacggcgcgctcgcgggctatcaggatcaggcgcgcgtgtcaacatgggcgcgtgaggccatggcctgggccgtgggcaccggcgtgatcgccggcacgtccgcgaccaccctcgcaccgcggaagaccggcacacgcgccgaagttgcgaccgtgctgatgcggttttgcgagcagtgatcctgcaatcgaaaaaaaacacccggatctctcacgagatccgggtgtttttatgcggtttactggccgttggccgccgccgctttcgcgctgcggcagttggcgcgcagcaccggcatgagcgccgtgagcgcaatgtccagcttgcgggaatagtccccttccatgccgttgttgatccagtcgatgagcatgccgaacatcatgtccgtgtacatgcggatgatcgcctcgagatcctcgggcgcgatgtccatgttctgcgcgtagcgcgtgatgacctggcgggcatagtaatcgctcgtctcccacgtgaagcgctcgagctcttccttgccgtagccgtggtagatgttcaggatggcctgccggtcgttcgagaggttcgccgccagcgtcagaaagccctcgcgcatggtctcaaagttgccgttcgtgtccagaaactgctgcacgcgcagctcaaacacgtactgcgtgagcacgtaaacatccgtgaaataatagtagaacgtcttgcggctgcagccaacggcgtccgtgatcatcttgaccgtgatgcggtcgatcgtgtagtcgttgagcaggtgcatatatgcatccgcgagcgccgtgcgcgtccggttctgcttcatgaagtgtgcctccgttcctgcgccgggcaaacaccggcgctgttttttctggccctatagtaacccacatgtcaccataattcattggtcattattgcaatgatgtaacatttttgcacactttgcgaaacgattctacccgtttgtccggatttttcaggaatccagctctccctgcaggcggcaggtgcgcatcatgaacagggcaagctgcgcgcggttggcgccggtattcgggctgagctccgttctggtcgtgccgtagaggatgcccatggagaccgcccacgtcgtggcggaatacgcccagtcgggcacggtgttccagtccgtatagccgccgatcgggcgcgggcggacgcccttttccgggccgtaggcgcggtagagcatcgtgaccagctgcgcgcgcgtgaggcgggcatccggcgcaaagtgcgtgtcgtccgtgccgagcacgacctcgttggcataggcccagcgcacggcggcagcataccaggcgtcgtccgaaacgtccacaaacggtgcctccggcagttcggacacgtccggctcgtcggccatccgatagaggatcgacacgaacatggcgcgcgtcgtctgccccatggggtcgaaccggttcccgccgacgccgttcataaggccgaagagcacgcaatagtcaatgccctcgtgcatccagtcgctcgctgccggcatatcgtcaaacacgccgccggcacagtattcgtcaccgacgcagggatccgggatcctggccgtttccgtcttgccgcagtcgacgcaggtgcgctccatgtccacggcgccgtcgtccgtctcgatggccgtccaggcgctccagtggtgcaccggatagtagtactgcaccgcctccgtgacgcgctcgctgcccttgaaataatgcacggtgctgccgttggtgagcgtcatggaatagatcgacttcacggccggatcgagcacgcggtactccgtggccgagacctggccgatgatcatgacatagtggccgttggccgagtagccgttgaggtggatgatcggcgggctgtagctgccctcgccgccgacgtagcgcgcgatggcctcggcgagcgaggccttgctgtacgtcgcgccgctgaaggcgacgtcatccggcgtggtggcaaagggtgtgccgtagtggccgcggctgcgccagtaatcgccgagcgcgccgggcgtggcgtccaggccgaggtacgacagtgccatggagatgcacgccgtgaagcactcgtggttggcatagttcccatagctgccccagtaatccgagcagaacagatcgctgtaggccggcacctggcagacatagcggaccgtgcccgtcttcacgtcggcgtttttcgcatattccacgctcgcatagggcgcggcatcgacccggtcggccgccgcagcacccaccgtcagacagggcagcagccccgccagcaggcacagcgtcagcgccagactgaggattcgtttcttcatagatgactccttatgttccggtattttgcctggttgttgacataacgcatacacacaattgcttatcttacaccaactgttacggaattgcaaccttttttgctttccctaccaactttcgtggggcgcggcgggcaaattgcgcccggttttggcgcggaaagtggggacgcagagatttcgacaggatccgcaaacggcgttatgtaaacctctgaggcggagaatccggtcgtgatcacgcggacgtgcgcggacggtgcggaatatttttcgttatgtacataatatttcgcttgacagatatgcaaatgcataataaaatggaaatagaaggggcagcttccggcactgtgcggccaagcgcagccgatctccgacgcgaagccgggcaaatgcgcggcttccacagccaaagctgccggttcggcggggaaaatgccgccgaaccggcggaagtgcagcgttatgtaaaccgtaaggaggtgagggaccgccggaatgaaaaaacagaaacgatccgtggccgggtgcggcccggggcatggcatggattgaactgcaccagtcgctgccgcagcaccgcaagctgctggccctgcgcgacgcgctggggctgcgcacgccggcggcactcgggcacatgtgcctgctgtggctgtgggcgctggacaatgcgccggacggcgacctgtccgccctgccggcaaggcagctggcggagatctgccagttcagcgagcgccgggccggcgacctcgcggtggcgctgcgcacgtccgggttcgtggacgcagactggcggctgcacgactggggcgactacaccggccgcctgatcgaccagcgggcggccagccgcgagcggcagcggcggcggcgcgcacggctgcgcgcggcggccatggaagaaaacaaggaggatggtacatgaaaaagcagacgaacaccgacctgcggcgaaagctgcgcgagcagcgcgcggcgtatgaggagctgctgggcctgtcgggcgcgattttggctgcgctgtgcgtgcgctgcggcgacggcgcgacgctgcggctgccgaagcaggccgtgcacgacgcgctggagacctacgaattcgcggcggctgccgacggcgaggactacgtgctctcgtaccgggagcgcgcgacatgatcgacctcgaggacgagaaggagcgcatcctcgagcagctggcagccatggtggccgatgcgtccgtgaagccggagctgcggctcaaggcggcgggcatggtgctcggccacgagcggggcaaggccgcgcccgcgaaggacgagggcgcggccgagccggaggtgctgcgcttcgagggcgcgctcgagcagtggagccggtagcaaggaggcgcgatggcacgcaaaaacgaaccctatatttataaggtactgcggagcgagacgccgaacccgcggcagcaggcgttcttccgcgcggaggcggccaacatcgcctacggcggggcgcgcggcggcggcaagagctgggccatgcggcgcaagctcgtgctgctggcgatgcgctatccggggctgaagctgctgctgctgcgccggacgctgccggagctgcgcgccaaccacatcctgccgctgcagcgggagctggcgggctatgccgcgtggagcggcgcggagcgcgcgttccggttcccgaacgggtcgcggctcgtgatgggctactgcgacagcgacagcgactgcgcccagtatcaggggcaggagtacgaggtgatcggcttcgaggaggcaacgaacttcgagcccgactggctgacgttcatcgccacctgcctgcgcacgacgcgcacggacttcgccccgcgcatctactacacgtgcaaccccggcgggccgggccacgcctacatcaagcgcctgttcatcgaccgcgcgtttcacgacggcgaagacccggcggactatgtgttcatcccggcgaaggtctacgacaaccaggtgctcatgcagcgcgaccccggctatctcaagcggctggaggcgctgccgcccgcacggcggcgcgcgcaccttgaaggagactggaacgtgtacgaggggcaggtattcgccgagtggcgcgacgaccccgcgcactacgccgacgggaagtggacgcacgtgatcgatccgttcgacatcccgaacacgtggcgggtgtaccgcagcttcgacttcgggtacgccaagccgttttccgtgggctggtgggcggtggacttcgacgggcggctgtaccgcatcctcgagctctacggctgcgtgcccggcgagccggacaccggcgtgcgctggacaccggagcagatcttcgagcagatccgcaccacggaggccacgcacccctatctgcgcggccgggatatccgcggcgtggccgaccccgcgatctgggacgcatcgcgcggcgacagcatcgccgacattgccgaccggtacggcgtgtacttcgagccgggcgaccacaagcgcctgcccggctggatgcaggtgcactatcggctggcgttcgacgctgccgggctgccaatgctgtatgtcttccgcaactgccgggacacgcggcgcacgctgccgctgctgcgctacgacgcacacgcgcccgaggacgtggacacgcggcaggaggaccacatcgccgacgagatccggtatctgtgccagtccgaccccatcgcgccgcggcccgtggtacaacggacgccgaaagtgttcgacccgctgagcagagattagttatgtaaacataaaaagactgcgatggcagtctctttttctcacaaaatacgaaaagttatgtaaaccatttcgccggaaacggcagcaaaggagagtctatgacaaacgagaaaacgaaccccatgccctaccgcgcggcggatgcggcggcgatgccggcggcggcaggtgcggcagaggcggccgggccggacatggccgcgcccgtgatcacgccggacgacgtggcgcgcggcacggagcttctgcgccggtacaaggacggcaagcgcgcgctcgaggcgcgcatcatcgccgacgagcagtggtaccgcctgcggcactggcagtatctgcgcgaccgccggcgcgagcagggcggcgacgtggtagagccgacgagcgcgtggctgttcaacgccattgtctcgaagcacgccgacgcgatggacagcttcccggaggcggtgatcctgccgcgcagcgagcaggatgaaccggacgcgaaggcgctgtcggccatcgtgccggccgtgctggaaaagacgcactttgagcaggtgtggtccgatgcgtggtggtacaagctcaagcacgggtgcgcggcctacggcgtgttctgggacagcgccgggagcaacggcctcggcgacgtggccgtgcgccagctcgacctgctgaacctgttctgggagccgggcatcacggacattcaggccagccgcaacctcttcgtgtgcgcgctcatggacaacgacgacatttccgccgcctggcccgacgcgcggcccggcaactgcggcgtggagctggcgcagtatctgtatgacgacgcggtggacacctcgaacaagagtatcgtcgtcgactggtactacaaaaagccgctgcccggcggcggcacggcgctgcacctgatcaaattcaccgggcgcgacctgctctacgccagcgagaacgaccccgccatggccggcggcttctacccgcacgggcagtacccgatcgtgttcgacgtgctctaccccgaggccggcacgccgtgcggcttcggcatgattgccgtgagcaaagacccgcagcagtacatcgaccgcctgagcggcaacctgctggagatgagcatgaaggcctccaccccgcgcttctgggtcaagaagggctgcggcgtgaacgcgcaggaatttctcgactggtcgaagccgctcgtcgaggttgagggcagcatcgacgacgaacggctgcgccagatcagcctctacaacctcgacggccagtgggtgaacatgctgcagctgaagatcgacgagctcaaggagacgagcaacagccgcgacgtgacgcagggcagcgtgtccggcggcgtgacggcggcgagcgccatcgcggcgctgcaggaggccggcagcaagtccagccgtgacacgctgcgcgcgagctaccgcgcgttcgagcgcgtggtcgagctcgtgatcgagctcatccgcgcgtactacaccgagacgcggccgtttcgcgtggcggcgccgggcgcgcagggctatgcgttctgcacgtactccaacgccgggctgcaggctaggaccgtgggcatggacgccgacggcatggcgctgctgcgcgcgccggcattcgacgtgtcggtgcacgcgcagaaggagagcccgtacgcgaccgcgtcacaaaacgagctggcacggcagctgtatcagctgggcgtgtttaaccccgcgttcgcgcagcaggccgtgccgatgctggagatgatgcagtttccggggcgcgacaaggtgcttgaggccgtgcgcagcagcatcgtgccgccgcagccggagacgccggacgcgggcacggacacgtccgccgacccgctgctgcgggcgcaggcagagaaaaaccgcgtcatcacagcgagcgcccgctgagggcagaagggagcacagagtatgaacgaacaaaacatccccaccgcgccggagcagagcgcatccgcagcacccgaaacggccgcgccgcgtgcgccggccgaggaggccgtgaccgtcggcgcgctgcgcggcgcgatcgagcgcaaggcccagcagcgggcgcgccgcgcggccgaggaatccgccgcgcgctggtcgcgcgaggcggacgagctggcggcgcagtgcccggactttgacctgggcgcagcgctgagcgatgcacagttttgcgcgctgctgcgcgccggtgtggacgtgcgcacggcgtggttcgcgctgcacgcgcaggcgctgctggaggcggcctgcgtgcgcgcgggccgcagcgccgagcagcgcgtggccgaacacatccgcgcccgcggcctgcgcccggccgaaaacggcctgggcggcggcggggccggcatcgtggtgcggccggacgtgtcgcgcatgagccgcgccgaccgcgcggcactcgccgcgcgcgcggagcgcggcgagcgcgtgaagctgagcctgtgacccgcttcgcgtacatccgccgggacgggcggtgcgtgctgcgcgcggacggccacgcagacttctgcccgggcagagacatcgtgtgcgccggggcgtcggcgctcgtgtgcgcgctggcaggcgcgctcgatgcgctgggcgcgcagggcgtgcagcgcgcgctctgcgccgggcacgcagccatcgcagcggacgaccgggccgatgtgcgcgcggcgtttaccgtggccgtgacaggcctgcggcagctcgccgcggcctaccccggccacgttgcggaggacaccggccgcgtccccgcgcaggagacaaaacccaacggcagcgcagcggccgggcgctgccccggcgctgtccccggaagcggacagcagagaaaaaaggagacatgagtatggaaaacatccacatggacctgcgcctgtttgacgcaaacacgcaggtgaccacccagcagagcctgaccgaggagatgaagacgttctactcggactacctcatcgacgcggccgagcccgagctcgtgcacgaccagttcgcgcagaagcaccccatccccgcaaacggcggcaagacgatccagttccgccgcttcgccccgctcggcaaggcgctgaccgccctgaccgagggcgtgacccccgacggccagagcctgagcatgaccaccgtcgaggcggccgtgcgccagtacggcggctacatccagatgagcgacctgctgctgctgaccgccatcgacaacaacctcaccatggccacgaagctgctcggcgcgcaggccggccgcacgctcgacacgatcacccgcgaggtgctcgtcggcggcgacaacgtgcagtatgccgacgagtccgtgtccgcgcgctacctgctgcagggcggcaacgccagcgccgccgacaacaactacctgaccgtcgactgcatccgccgcgccgtgcgcgcgctcaaaaacgccaactgccgccgcatcgacggcgcgttcccggtcatcatccaccccgacgtggcctatgacctcatgaatgacccgaagtggctcgccccccaccagtacgttgacaccgagcacatgtacgagggcgagatcggcaagattgagggctgccgcttcgtcgagagcacggaggcaaagatcttccacgcggccgatcttgccggcgacagccgcaccctgctcacggccggcgcggtgagcggcaagaccaccttcccgttcgacggcggcacggtccaggccggcgcactcgtcggccgccaggtactcatcggcaatgcgtgcgtgaccgtcacggccaacaccgcaagctccatgaccgtcgacgccgccgtcacggccgaggacaacgccatcatctaccccggcgaggccggcgcgcagggccgcgacgtgtacgtcacgctcgtgctcggcgccgacggctacggcacgaccgagatcaccggcggcggtctggagcacatcgtcaagcagctcggctctgccggcacgggcgacccgctcaaccagcgcgcaagcgtcggctggaaggccacgaaggtcgccgtgcgtctcgacgacagcgccatccgccgcatcgagacctgcagcacctacaccgagtaaagaaatccacccatgcctcccgcccgcgcggcgggaggcgcacctacaacaaggaggaaacaactatggcaaccagaaaaaagaccgaccgcgccgccgctgaggcctggctgagcgaacccgtgaccgtgcgtctgttccgcgacaacggcagctacaaggaggacaaggtcgtgaccgtcaacggcgagaccgtgcgcatcccgcgcggcgaggacgtgatcatcccgcgccgcttcgcgctcgtgctcgcccagggtgaggcgcaggacgcgcgcaccggcgcgctcatcgagcgcgagaccgcccgctttgccgccgagagcggtgcgctggggctctgaccatggcgacgcttcagcaggcgctcacgcgcatcgacacgatctgccccaacgcatgggacgacgcggcaaagctgctgtggctcaacgaatgcgagagcatgatccagacgcgcatcctcggcactgcgcccgaggcgtgcatcacctatgacgcggacaccgcgcgcagcaccgtgctgctcgtgcccgcgccgttcgaccggctgtacgtgtactacgtcatcgccatgtgcgactacgccgcgcacgagacggcgcactacgccgacagcatgatgctctttaacgcggcgctcgacgagtacgccaagtggtatcagcgcacgaacggtaccgcggccgcgacccccggcgcggcggcgcagatcgccgccaacagcgccgcccggcacatgcacgaaaacaagggcgtgctcgacggcatcacggccgcgcgggccgccgcgtgggacgcgaaggtctcccccgccgcgctcggcccggccgtgaacacggcgctgcaggcggcaaaggactccggcgcgttccgcggggacaagggcgatcccggcgaaaaaggcgaacccggcgcacccggtaagacacctgtcagaggcacggactattggacggtagctgataagcaggagattgtcaacagcgtcatagccgccctgcctgatggcacggaggtgagctactgagatgaaaaagctctacgaagaaaccgccgtacaggacattgcagcagctatccgcgagaaaaatggcactgcaacgaaatacaaagtcgcggagatgggcgatgctgtgaggcgctgcttgaacaccggagtggaaaccgaagtgtacacatttgaccagtgccgcgcagaggtagacaggtatctgaaaaacgtcacttacgacccctcggactacgctgtctcgcagatacccgaatatgtgacgacagtgagcgcaaaccgacctgttggcgtagacattgtgatgaagtccgccggaacgctgac

SEQ ID NO: 13972 - DNA, 344 bp, Unknown
  gut microbiota DNA sequence
gataaacttttccaagtccatgaagtacagcccctttgtctatatccactcggaaaaagacgtgctgaagctggtgaatacccttatcgccaacaccaagggcgagggtgaaaaatcagcagaagatttttgggtgaagtcggaacggctgttctacacggctctgatcggctacatctggtacgaggccccggcagaagaaatgaacttcaccaccctgctggaaatgataaatgccagtgaagcccgcgaggatgacccggagtttcaaagcccggtggacctcatgtttgaacggctggaacagaaagacccggaccacttcgccgtccggcagtacaaaa

SEQ ID NO: 13973 - DNA, 7819 bp, Unknown
  gut microbiota DNA sequence
gctggctttccggctgcctttctgctggctatcctgtgcggctgcctttctgctggcttttctgcgcggcggcctttccgcagccgttcctatgtgcctgcggccaccgtgcagcctttctcacgcggcctttgcggtcttgcccgcgcgccacgcctcgaaccgggtgcgcatatggtcgttcaggcggcagaacgccttcatcaccggccacgacagcaggccgaacacgataaggatgagcgcgctctgcagattgagcttctgcaggctgaagagcgtcgggaagccgaaatacgcgatcacgaacagcacgccgagcacgacgatcatcaccttgcggatggtgttgtacggctggcacgtgcggtgcaccatcatgaggccgacaatgcccatgacgccggtgcagatcgtgatcatagccgtgtcgtcgagctggaaggcgatataaaacagcagaatgcccacgaccatcgccagatccgtcatcgcggccggcagcgcgcggaagagcacattgcgcaggaattttcccttgacgaggctctcgttcggctccatggcgaggatgaacgacgggatgccgatggtcacggcgctcacgagcgtgagctgcgcggggctgaacgggtacggcagcgtggcaaagagcgtgaaaaacgcgaggcagaacgagaaaatgttcttgaccagatacagcgaggcgctgcgctcgatgttgttgatgacgcggcggccctccgccacgaccgacggcatggaggcaaagttcgagtcgagcagcacgatgtgcgacacctgacacgccacgtcgctgcccgaggccatggcgatggagcagtcggcctccttgagcgcgagcacgtcgttgacgccgtcgcccgtcatggccacggtgtggccgtcggccttgagcgcctgcacgaggctgcgcttctgcgcaggggtcacgcggccgaagaccgtgtacttgcctgccgcgtcgcggatggcctcctcggtcgtgagcgtgcgcgcatcgacgaagcggtcggcgttttcgatgccggcgcgcttggccacctcggacaccgtgcgcgcgttgtcgccggagatgaccttcacggccacgccctggctggcaaagtagccgaacgtctccggcgcttcggcgcggatcttgttcgagagcaggatcagcgcgatgggcagaaagccggcgctgagcgtctcgtccgtgagcgcgccgtcatacatgcccagcagcagcacgcggcagcccttggcggagtagccctcgatctgctcctgatacgggttctcgcgcccggcgagcagcacgtccggcgcgccgagcaggtacgtctcctcggtgtggaacgacacgccgccgtatttcttcgccgacgagaacggcagcgtcgccgtcgcgtcctgcgtcttttcgcccgtgaagtagcgccgcagcgcggccatcgtgtcgttgtcggcctgcatggcgtagacgtagtcggccatgatcatgcggatgtcctcgagcgtgaagcggtcgtcgcacagggggcagacgtcttcgacaatcatcttgttttccgtcaccgtgccggtcttgtccacgcacagcgtgtccacgcgcgcgagcgtctcgatgcagccgagctcgtgcacgagggtcttgcgctgggccagacgcacgacgccggccacgagcgcgaggctggtgagcagatacagcccctctgggatcatgccgatgatcgagccgaccgtgctcgtcacggcgatgggcacggcgcggccgagccacacgtattccttgacgaacatcaccacgccgagcgggatgacgaggatgccgatccacttgacgaggttttgcagcgagcgcatcatctccgactgctgcggcttcttggcgcgcttggcctcctgcgtcaggcgcgagacgtaggagtccgcgccgacgtccgtcagctgcgcgcggcacatgccgctgacgacgaagctgcccgacaggagcttgtcgccggggtttttcttaatttcgtccgactcgcccgtgatgagcgcctcgttgacgtagcagctatcttgcgcgacgacggcgtcggcatagatctggttgccggcggcgaagacgacgatatcgtcgcgcacgagctgcgcggtgtcgacggtcacgcgcctgccgtcgcgcacggcgacggccttgggcgatgcgaggatgctcagcttgtcgagcgttttcttcgagcggatctcctgaatgatgccgatggcggtgttgacgatgatgacgcccatgaacgtcaggttcagccactgctgcaccgcgatcacgcacagcgccagcaggaaaaacagcatattgaaataggtaaagatattgctcaggacgatctgcttgaccgtcttgcccggcgggtcgacgggcgcgttcgtccagccggcgtccgcgcgctcacgcacctgcgcgctcgtcaggccctgctgcgggtcggggtgcgcgacgggcacgtcccgccgctccggcgtctcgggcgcgggcgcgcgccggtctttgattttttcgatcagattggccaaaggtctgcctccagaatgagaatacccaatattatagcgtctcgcgcggtggaatggaacaacagtttgtgaatatttgcttaaaaatggtgggatttttcggcagcctgcacagtatgccgcagcagcagcgcggtcgtcacgctgccgatgccgccgggcacgggcgtgcaggcggcgatggcggcggccgcaggcgtcacgtcgccgcgcagcgtgccatcggacagtgcggtcgcgcccgcgtcgagcacgatctgccccgggcgcacgcactccggcgtgatgagccccggcgcgcccgccgcggccagcagaatgtcggcggcccggcagcgggcggcgaggtcgggcgttttccggtggcagagcgtcacggtcgcgtccgcgcgcgtgagcagcagcgcggccggccggccgatcacgaggctccggcccacgacggtcacgcgccggcccgcggggtcgatgccgtgcgcgcgcagcagagtcatacacgcctcggccgtgcagggggcgaagcccgccgccccggtcacgagcgcgccgagcgaccatgtcgtcatgccgtctacgtccttgcgcgcgtcgagcgcgtcgaggatttcctgcgcgcgcagcgccgccggcagcggccgcagcagcagcacgccgtgcacgccgtcgtccgcgctcagggcgcgcagggtgtccgtcagtgtttcgggcgcgcagtccgccggcaggggcacggggcgcacggtgacgccgcagccgaccgccgagagtgcgatgctgcgcagataggccaggtcgtccggctgcgcgccgacggacacggccgcgaggcagggtggctctgtgagccgcgccgcgcgcgctcgcacctgcgcatagatcgccgcggcggcctccgttccggtcagggtgttcggcatggttcagccctccccgcgcagcgcggcgcgcaccgcgtccgcagtctgcgcgcagcactgcaccacggtcgcgcgcaggcgcgcggcgcgcgcctcggtcgcggcgcggtcgtccggcgcgagcaggccggtgttgaccagcacgttcagttccgccgcctccgccgccgcgctgcacagcgccgccgcgcacccgacgtccgagcgcaggagggggctggccgtgctcagcgcggcgggcagcagcagcgccacctgctcgcagtgctccagcatggccagcggggcaaggcacgccgtgtgcgccgcgtccgcgagccgggcggcgcgcgtggggtcgtctttcgggatggcgtaggcccgctgcagcggcagaaagcccgccgcgtccgcgtcgatgagcgcgagcagcgtcgtgcgctgcgcgtcgcagctggcggccagcgtggcgagcgcgtcgtgccggtcggcgtagcgggggttggctgccgtcacgttcgcggccatcgcggccaggctcgccgccagcgccccggcgagcgcggccgcgcccccgccgcccggtgcgggctgcgcggaggcgagctgcgcggtgaattcggaaagggagcgcccggtcgtaagcgtctggtcggtcatatggaaaacctccttgcgggatgatgatcgtgtggtgtcgtgtccgtcaccggcacacatattatattgtattatatattataccgcgcggcggggcggttgaaaagtgggcgcggggctttttgcgcgctttttgggcatactgacccaaaagggaggaatgaccatgcaagacggtttcctgcgcgcggcggcggcgtccatccccgtggccgtggcagacccccggcgcaacgcggcggcggtctgcgcgcgcatcgaccaggcgcaccgggcacgtgccgcgctgctcgtgctgccggagctgtgcgtgaccggctacacgtgcggcgacctgtttttgtccgcgctgctgctcgatgcggccgaagaagcgctgctgaacatctgcgcgcacacgcaaaactgcgaccccgtcgtcgtgctcggcgtgccgctgcgcgccgggggcaagctctacaactgcgcggccgtgctgcaccgcgggcgcatcctcggcgtcgtgccgaagacgtggctgccgaactacgacgtgtttgcggaaaagcgctgctttgcctccgcggcggcgtaccatgggccgggcagcgtgcccgtcagtggggcggacgtgccgttcggcacggggctggtgttcgcctgcgcgcagatgccggcgtttcgcctcggcgtggagctgtgcgaggatgtgtgggcgccgataccgccgtcggtgcggctgtgcctcgccggggcgaccgtgatcgccaactgctcggcctcgcccgaggcggccggcaagcccgcccaccgccgcacgctgctgcgcgcggccagcgcgcgcggcctctgcggctatgtctacgccaacgccgggccggacgagtcgagcgcgcgcgccgtcttttccgcgcaccacctcatcgcggaaaacggggacatcctcgccgagcacgcgccgttcgcgcccgagcccggcctgctcgtgacggagctcgacctgctgacgctctcggccgagcgccggcgcaacacgaccttcgtgcccgagggggcgggggcgcgcgccgtgccgttttccatgccgctgcgcccgacggcgctcagccgcgcggtgtcgccgcacccgttcgtgccggacgatgcagccctgcgccgcaagcgcgcagagctcctgctttccatccaggcgcacggcctgcgcaagcgcctgctgcacaccggcagccgggcggcgctgctgcccgtgacggacgatctcgacagcgtgctcgccctgctcgtgtgcgcgcgcacgatggatctgctcggccgcgcgcggcacgatgtccttgccgtcacgcagccggggggcgaccgggcgcgcgtgctgcgcctgtgcaaggcgctgggcgtgtccgtgcggccgaacgccgaccgcgcggggcttgcgcgcacgcacgcggcgctcccgctcgccgcgcccgacttcacggccctgctgctgggcgaggccgtgtgcgcgccggaggcctacggcgtcaacgccgccgtgccgcgcacgctcgtgcgctggctcatcgcggccgaggccgagcgcgcggaagcccccctgcgcgcggagctgcgcgccgcgctctccgcgccggacgccgactgcgccggcgtctcgtgcgcgctgacggacttttgcttttaccacctcgtgcgctgcggcgcgcacccgcggcgcatcctgcggctggcccgcgccgccttcggcgacgcggccgcggacgccgacattctgcgtgccatggcggcgctcacgcgctgcctgttccggcggccggccgcgctgcccgaccacgtcgcgctcggcagcagcgcgcaggcgctgcactggccgccggacgcggcgggatcgctttggagcgaggagatcgacgcgctgcgccgcgagctgtcctgagatcaatattcaaaaatgcgtgcatgactgcatattctgccgccgctctgaatgccggagcggcggcgtttttcgcatatctttcgcgcttttgtgcatatcaccgaaagaaaagcgtttctcgcgtgaattttattcaaaaagagggttgacatttgcgcgaaaaaggtgaataatatgcacatcttatgaatgaataatcaatggaggcaaccatgatgaaaaaagaagatatcaaaaaagtcgtccttgcttactccggcggtctggatacgtccatcatcatcccctggctgaaggaaaactacaataactgcgaagtcatcgccgtgtccggcaacgtcggccaggccggcgagctcgacggcctcgaagagaaggccatcaagaccggcgcgtcgaagctctacgtgctcgacctgacggacgagtacgtagacgattacatcatcccgaccatgcaggccggcgcgatgtacgaggagtacctgctcggcacgagccacgcgcggccgtgcatcgccaagggcctcgtcgagatcgcccagaaagagggcgccgacgccatcgcccacggctgcaccggcaagggcaacgatcaggtccggttcgagctggccatcaagcacttcgcgcccgatatgcccatcatcgccccgtggcgggagtgggacatcaagtcgcgtgaggaagagatcgcctacgccgaggcgcacaacgtgcccctgaagatcaaccgcgagacgaactactccaaggacaagaacctctggcacctgagccacgagggtctcgacctcgaggatccgggcaacgagccgcagtacgagaagccgggcttcctcgagatgggcgtcagccccatcgacgcgccggacgccccgacctacgtcacgctcgactttgagcagggcaagcccgtcgcgctcgacggcgagaagatgagcgccaaggacatcatcctcaagctcaacgccatcggcggcgccaacggcatcggcattctggacatcgtggagaaccggctcgtcggcatgaagtgccgcggcgtgtacgagacgccgggcggcacgatcctctacaaggcgcacagcgtgctcgagacgctctgcctcgacaagatgaccatgcacgagaagcagaagctcgccgtgaccttcggcgaactggtgtataacggccagtggttcacgccgctgcgcgaggcgctcagcgcgttcgtgaccaagacgcaggagcacgtcaccggcacggtgcggctcaagctctacaagggcaacatgatcaacgccggcgtctggagcccgtactccctgtactccgaggagatcgccaccttcggcgagagcgactacaaccaggcggacgccgccgggttcatccagctctacggtctgccgatcgccgtgcaggcaaaggttgacggcaagagcatgtaagcggtacaataaatatatagaaatgattttctccccgcgccgggcctcccggcgcggggcagcctgtcaaaaaagctttttcaaacgagaacccagcgaagcggttctctgtggagacaacgcacgaagggagaccatcaccatggcaaaaatgtgggcgggccgcacggccggcgtgaccgatccggtcgcggacgatttcaactcctccatccgcttcgacagccggatgtaccgcgaggacatcacgggcagcatggcgcacgcggcgatgctcggcgcgcagcacatcctcccgcaggcggacgccgatgccatcatcgacgcgctgcagggcatcctcgacg

SEQ ID NO: 13974 - DNA, 29156 bp, Unknown
  gut microbiota DNA sequence
gacacgctggacctgccgggggctgcttcggcgggttttcgcttaatttttcttaaagctggcagtttcctctgtccgcgcacgccgcgaatgtgttaggatagaccccagaggtgataccatgggaaaccccgagacccctgtccgcatcctcgtcgtggacgacgagccggacatccgcaatattttacacattctgctctcgtcgcgcggctacgaggtcgacgaggccgaaaacggcctgcgcgccgtggagctcgtgcgcgcgcagccggactatgacctcatcattctcgacatcatgatgcccggcatggacggcgtgtccgcctgcgcggagatccggcagcacagcgtcgcgccgatcctgtttctgacggcgaaggcccagcccgccgacatgagcgacgcctacggcagcggcggcgacgactatctcatcaagcccttttccaaccacgagctgttcctgcgggtcgactcgctcatccgccgctaccgcgtctaccacggcaagggcgacgcgccgacggtcatcgacgcgctcgagatcaaccgcgacaagggcaccgtgtgcaaaaacggccgctccgtcgagatgaccaagacggagtttgagctgctgcagtacctgatcgccaaccgcggcgcagccgtgtccgcgcgcaagctctacgaggacgtctggcacgagaagttcctgcccagctctgccaacaccgtcatggtgcacatcctcaagctgcgcaagaagctcgaggatgaccccgccaacccgacgctcatccgcacggtctggggaaaggggtatcagattgattaaaaagtggtgctcatcgatcaatgcgcgcatgatcttcgtgctcctcgcggcgctggccgtgggcgtggcgtgctatttcggcatagacgcgctcggcacggaggcgatcgaccactggtatctgagcgatgacgccgtcgccgcgcgcaatctggagcacgcgcgcagcctgcaggaatacgtcagcgcgcgcggcgtgtcctcgcgcgacacgctggccatcgagcagtggtcgcgcggtgagaaaaaagccaacgtcatcgtctatcaggcggagggcgacccgtacgaggccggctcgtggggcatgagcgagctgctcgacgacacgacccagagcgacattgccgacatgggctacagcttcttcaccctgcagtttgccgacggggagtgccgcgtcgccgtgtgcgactattccgaggcgtggctctacagctatgtgcgcttcggcgcgctcgtggtgggcttcgtggtctattcgttcatcgccatcggcttcacgcggcggctcacgcggcgcgtcacgcgcctgtcggaggccgtcggcgcggcgggcgcgctcaaccagaccatccccgtcatcggcacggacgagctcgcgcgcctggcagcgagcgtcaacaccatgcgcgacacgatcctggagcgcacgcgcaacgagcagaccgcctggcaggccaacagcgacctcatcactgccatgtcgcacgacatccgcaaccccctcacgtcgctcatcggctatctcgacctgctcgagatgagccaggaccgcctgccggaggacctgcgcagctacgtgctcgccagccgcgacaaggcctatcagctcaaggatctgacgggggagatgttccggtattttctcgtcttcagccgcggcgaacaggagacgcaccccgagccctacgacgcgcagatcctctgcgcgcagctgcttggcgagtgcacggccgagctgcgcagccggggctttgacgtcaacctcctgctgctgaccacgccctgcaccgtcacgaccgacgtgcagatgctcaagcgcgtgacggataacctcctgtcaaacatcgaaaagtacgccgaccccgccgcgcgcctgaccattctggccgagtgcgagggcgagcggctgcacgtctgctttgccaaccgcgcgcgccgcgagcttgcgcgcgtcgagagcaaccacatcggcctgcgcacgtgcgaggcgatcctgaagctgctcggcgggcagtttttcacccaccgtacgggcgatgatttctcggccgagttcgtcctgccactcacgccgccggacgcggcgcagggctgagcgcatcgatccctcagtcagcctgacggctgccggctccctttgcacaagggagcctatgaggtgcgggacgaacgcacggtgcaccaccggcggcgctggaggaaactgcggcttttctgccatgatgctggtcgagcggcacagaaacggaatcgccaaggtgtgcgatgtcaggaaacacggcatccaccttgctgcgctcagtacctttttctcgagggcaaggcttgggtgcgcagcgcaggcaacgctgtacccgcctctctacataacaaatccgcaaaaaagatccccgaaacgaacgtttcggggatcttcgctttgtatgggtgatggatcagcgatcacacaatgccctgagccatcatggcgttggcgaccttcaggaagccggcaacgttggcgccgagcatcatgttgcccggctggccgcactcgacggaggcgtcgtagcaggccttgaagatgctcttcatgatgccgtgcagcttctcgtcgacttcttcgaagctccagctcatgcgcagggagttctggctcatttccagaccggaggtggcaacgccgccggcgttggaagccttgcccggcgtgtagagcaggccggcctcgatgactgcgttgatggcctcgggggtcagcggcatgttcgcgccttcgaacacggccatagcgccgttggcgataacggccttcgcgccctcgagatccatctcgttctgggacgcgcacggcatggcgatgtcgcacggcacggtccagatgttcttgcagccctcgtggtactcgctgccgggcacttcgtcagcgtagacgctgatgcgggcgcggcgcttctgcttgatgtcaaacagcacgtcgaggttgatgccgttgggatcgtagacgtagcccttggagtcgctcatggcgatgaccttgccgccgagctcggtgcacttctgcgcgcagtactgcgccacattgccggaaccggacacgatgaccttcttgccctcgaagctgtcgtttctcaggtgcttgagcacttcggcggagaagtagcagatgccgtagccggtggcctcggtgcgggcgagagagccgccgtaggtcaggcccttgccggtgatgacgccgccctcaaagcggtcgacgatcttcttgtactggccgtacatatagccgacctcgcgcgcgccgacgccgatgtcgccggccggggtgtcagtgaactggccgatgtggcgatagagctcggtcatgaagctctggcagaaacgcatgacctcaccgtcggacttgccgtgggggtcaaagtcggagccgcccttgccgccgcccatgggcagggtggtcagggagttcttcaggatctgctcgaagccaaggaacttgacgacggacaggttgaccgagggatggaagcgcagaccgcccttgtaggggccgatcgcggagttgaactgcacacggtagccgcggttgacctggaccttgccgttgtcgtccacccagggaacgcggaagatgatgatgcgctcgggctcaacgaagcgctccatgaggccggcttcttcccactcggggtgcttgtcgacgacgtactggaggctctcaaagacttcgtcaacggcctgcaggaactcgggctcgttggggtggttcttctgaaggtcggcgaaaacgcggttcagatatgcattgttgatcattttcttacctctttcttgttattcacgttgctctcaaaaacggcctgagcggccaatttcctttatcatggtaacgcaaacggagagggattgcaatatccgttttccatataatttctcaatttttttgtgcaaaaagtcagaaagggcgctttgaattgcgctgttttcgtcaaaaaaacaacattcccgtgtaaaagctggcaatttgcggccgccatttttatgcaggtgcaaaaaaagcacttgacaaattattctaacgagtataaactaagagcgaaagttatccaaatgcataataattttgcagccggaagggaggaatgcggatgcggcgatgcgaggtgtgttttgcgccgctgccggcgtgggaagatgcgtacctgtggccgtgcgcgcacggcgggctgacggtgtgcgccgattgctttgacacgctcgtgggcggcctgtcgcggcgggagctggccgcgcgcctgagcgcaccgggagcgtgaggggggcggagcagcaaaaacccgcccacggtgtggacgggcaggtcatgtgcggtttttcttcgcggtgttgacggaggcaatccagatttttttcagttccgtgcatttgccgggcgtttctgtgtcgctgcaatatccgctttctatgcgtattcacgattacctatcccctgaatcggcaagtttcgaaaggaaagagcggggagtgagggaagagggaagagggaaaaagaaaaataccgaccgtccagaaggacaatcggtatttttggtgggggaagatggattcgaaccatcgaaggcattgccagcagatttacagtctgtcccctttggccactcgggaattcccccatatgcaattttgtcagaaggtggagctggtagacggactcgaacccccgacctgctgattacaaatcagctgctctaccaactgagctataccagcacaacaccggcctatgtatcatagcaaaacggactatgtttgtcaacaaaaattttcggaaaattcaatgtttttggagggagaacatgcaactgatcgaattggcggcgcagtaccgcgccacgggcaacgcgctgcgtgcgcgcgcggccaccttgcgtctggagctggcggccatgccgcgcgccggccgcgcccggcgcgatctggaggcgcgcatcgcgcgcctggagcagatggcgggcgagactctgtgcacggcgagctatctcgcgcattattatgaccgcagctgaccgcgccggccgtcgggcgggcccggtttgcgttccggcggcaggtgtggtatacttatcggcatgaaacgcttacatatgaaaaacaattccacattccgccgcgtgctggccgtgctgctggctgcggcgatgacgttcgcgctcacgggctgctccgtgcgcgagctgcacatcggccaggtcgaggtgaacaccggcgccggcacggcgtggatcaccccggccagaggcgtggacaagttcgacattccggcggccgatttttccgccggggcggacggcagcgtgacctacaccggcacggcctaccgcgcgctgcagggcatcgacgtgtccacgttccagcaggacatcgactggcaggccgtcgcggattccggcatcgccttcgcggtcatccgcgcgggctaccggggctacggcaagggcggcatcgtcgaagacgaccgcttccgccagaacgtggccggggcgtgcgcggcggggctgcgtgtggggctgtacttcttctcgcaggcggtcacgcccgaggaggcggccgaggaggcgcagtggctcgtggacgcggcgcgcgattacaagatcgacatgccgctcgtgttcgactgggagaacatcgaccagagcaccgtcgccgccggcgacacggtgcgcacggcggagatgaccggcgaggacgtcacggcctgcgccgccgcgttctgcgagacggtcacggccgcgggctacgacgccgccgtctacggcaaccgctggcaggggtactatgactacgactttgcccagctcaaagactatgccttctgggtgagcgcgccgggcacggcggacgatttttactacgcgcacgatttctggcagtacagctatgacggcacggtgccgggcatctccggcagcgtggaccgtgacctgtggttcgtgccgatcacgacctgaggaggcgcgcgatgaaaaaacgacttttgaccctgctgctcgcgctggcgctcgcggtgtcgctggcgctgccggccgccgccgcacagacgccggtggaggtgtcgagcgcgctggagctggcgcaggcgatggccgagccggtgtcggcgcgcggccgattccgctcccgcgctgccgcggccgagcccacgcgcgtggtcgccttcgcgcccgcgctcgcggacgggtacggcgcggaccgcgtgctgcatctggcggcgtggcaggagtacgtgctcgaattttccgacgcggcggcggcgcagcgcgcgctcgcgcgcctgcgctccgaccccgatgtgacggactgcttcctcgatgaggcggtcacggcggacgacacgctcgccggcctctgggacgagacggccagccgctcctggggcgggcacgaaatgggcctcacgacgctgcgccatcaggcggacgtgctcctgccggccggccgccgcgcgacggtcgccgtcatcgacacgggcgcggaggtctcgcacccgctgctcgcggggcgcgtgtcggcccacagctatgactttgccgacaacacggccgacgtgacggacgtcaacggccacggcacggccacggccgggctcgtcgccgatctcacgcccgacgaggtggacgtgatggtcctgcgcgtgtacggcgacgacaacctctcgaagccgtcgcgcgtgctcacggcgctcgagtacgcgctggaaaacggcgcgactgtcgtcaacatgagcatcggctggccgaacgccatcgaaaagggctactcctttttaaatagtgtcctcgcgcaggcgtatgccgcgggcgtcgtcgtcgtcgcggcggcgggcaacctcagccagagcaaccccaccgcgaacgcggacgatgtctatcccgccaatcaggcgcaggtgctcacggtctcggccgtggaccgccgccggacgtttgacgatacctattcggcctccggcgcgtcggtcgatctgtgcgcgccgggcacgggcgtcgcggtcgcggcgctctccggcggcatgacggtgcgcagcggcacatcgtttgctgcgccccatgtcgcggcggcggcggcctgcgtgcagctcgcgcagccgggcgctacggccgcgcgcgtgcgccggacgctctgcgactatgccgaggatctcggtgcgcccggccgcgacgatcagtacggcaacgggtttccggtgctcacgcagtgcttccacgaccggctgtgtccggggcggcgctttgcggacatgccggacgcggacgcctggtcgcacgccgggctggactactgcatcgcggcgggactgatgcacggcatgacgcccgtcaccgtcgcgccgcaggcgcttgccacccgcgcgcaggtcgtgcagctgctctgggcggcggcgggcagcccgaaaaccaccggcacgctgccgttcacggatgtggcgcccggcgcgtggtattatgacgcggtgcactgggcgtatcggacggggctcgtgtccggtacatcgcccacgacgtttacccccgacgccgccatcacgcggcaggacttcacggtcatcctctacgcgcaggccggccgcccggctatgatcggcactgcgctcgcggccttcccggacgtgggccaggtcgcgggctatgcctacgccgcgctcacctgggcggtcgagcaggggctgatcggcggcgtcggcacgccgtccggcccgcagctcgcgccgcgcggctatgccacccgcgcccaggtcgcaaagatcctcatgggctactatgacaaataaaaatgacagcaaaaccccgccaccgtttccgaaccggaagcgggggcggggtttgctattatcagcgggccgcagcccctccaacgagcgcccggcgcagcggggctcgtttgcccacgcttattcctccggcgcgggctcctcggtcacttcgacctcgatgtcctccggctcgacgacctcggcatcgacggtgtgcagatccggcgcggggcggtactccttagcggcggcgcgcagctcgtccatctgtgcctccagctcggcgacgcgcgcgttggcgtccgtcacctgctggcagagctcggcgaggaaggcgtcggccgtgtcgcggtagttttcgtagtacaggcggccgatctcggtgtacgtgcgcttgacgcgctcgagctcggcgttgcagtccacggtcatgcgcgtcatgcgcgaggcgtacttggcgcggtcgcccacggcgtgggcagcgccggcgaccttgtcgcgcatctcgtcgctgacgaccttgttggcggcattggtcacggtctcaccggccttgccggccgcgtcgacgaccttgttcttcaggctgttgagcatatcatgataatctttcatgggaaaaaacctccttgaaatatgaaactgcaaatgctttatgcgtccggctgcccgcccgcgccgcggtcaacatagcgcggtgcgtgccggagcttgccggtgtaaagcagcgcgagcacgacggcagcggcggccgccgacaccccggccagcagctggctgacgcggatgcccgtgccggcgatgtacaggctgtcggtgcgcaggccctcgatgagcgcgcggccgatgccgtaccacacggcgtagagcaaaatgagctcgccgtcaaacttccgctcgtgtcgtcgaaaccagaagtgcagcagcagaaagcccacgaagttccacaggctctcgtagagaaacgtcggatgtacgtacacggtctcccggccggggagcgtgagccccatgcgggagaaggcggtcgtctcgcggccgaaggcttcgcggttgatgaagttgccccagcggccgatgcactgcccgatgagcaggccgggcgcgcacacgtccgccatcgcgccgaaggggatcttctttttcctgcaccagatgatgccggtcagcagccccgcgatcacgccgccgtagatggcgagtccgccctcccagatcttgagcgcgtcgatggggtggtcgcggtagtcgctccactggaagatgacgtagtacagccgcgcgccgatgatggccagcgggatcatccagatgagaaagtcatagagcgtgtccggctcgatgccgcagcggcggcagtgccgcgcgcagtagagcatcgccagaatgaagcccacggcgatgatcacgccgtaccagtaaaacgtgcggccgaagagcgtgaacgacgcgctggggtcgatgctccagttgccgagcaggggaaagctaatggcggcgtcacgcatcatcgtcggcatcatcctcgcctcccttcggggcaacgaccgagagcgccaggcgctcgggcgcgagcgtctcggtcagccacttggcgcactccgccgccgtgatctcgccgagcagcgggaaggcgtccatgtgctcgtacccgccgaagagcccctcggccatggcgatgcacacatcgtcgaaccggtcaagcccgcgcagccagccgccgtacacggcgcggcgcgcccgctcgaaggccgggccgtcaaagccgtcacgcgcgatctgcgcgacggtctcgctcacgcgcgcgcacacggcgtcggggtctttgctctcgccgccgagcacggccatggcgatcgggccgcagtagtccgcgctgcagccgaagtcgtcgccgagcagccccgcgcggtaaagatcgttgtaaaacgccgtcgcctcgccgaaggcggcctgcagcgcgagctccgccgtgagcgtctggcgcaggcgggcctcgcccttttccgccgggcggaacttcgcgcccagcagcatctgcggcgcggacaccgcgagctccacgcgcatgcgcgcctgcgccggcgtcatgtcctccggtgcgccgtggtcggcggccgggacgggagagaggtccggcggcaggatctccgccgcgatggcggccacgcgctcgggcgtgtcctgacacacggcgcacagcaccatgttcgacggcgcgtaaaacgcgcggtggcaggtatagagcgtctcgggcgtgatctgcgcgatgctctcgaccgtgccggccacggcgtcgcgcgctccgtcgcgcgcaagcaggcagcgcatgaggtcgcgccacacggcgcggtcggggtcgtcctcgcccatgcggatctcctgagcgatgatgccctgctccttggccacgctcgcgtcggtgaaatacggcgtcgagacaaagcgcagcagcgtgcgcaggttatcctcgaaccggtccgtgcaggaaaaatagtaggccgtcatgttcgtggacgtgaaggcgttcgggtctgcgccgttttcgctcagcgtcagcagcgcgtccgacccgtcgggcatgtcaaagagcttgtgctcgagatagtgcgccacgccggcgggcgtgtccgtccacgtgtcatttacgcgaaagcgccggtccgccccgccgtagcaggtggcaaacacggcgtagctgcgctgaaagtcgggcttgcagagcacgcgcacgcgcaggccgttcggcagcgtcgccgcccagacgttttcgggtcgttcattcgtcatcggcaggttcctccgttcccttgagcagatacacacagtcgcacacgacgccggcggcgatgtccgtcacgtccgtgcgcgtgacctcttccacgagcgcggccatctcggccgggtcgatgtccagcccctgcaccgtgcggttgagccagtaccacgccagcgcgtcgggcgcgtcggccgtggcgcgcaggtcgctggccacgctgcggatggcggcctgaagctcgccgtccgtaaagtcgccggtgcgcacggcgtcgagctgcgccgtgatctcggcgagcgcgcgctcgtagtttttcacgtcgatgccgctcgtcacggtcagcaggcccttgtgtgtgctcaggcgcgagccgacgtagtagcacaggctgagcttctcgcgcacgttcaaaaagagcttggacgtgacgcagccgccgtagagggcgttaaagacgaacagcgccgggatgtccggctcggtcatgcacgcgccgagacggtagcccacggcgagctgcccctgcgcgaccgggagcgtctcggtcacatagcgcggctcggcttcgagcgcgttcatgcggatgtccgtgccgatgtcctcgtcgatctcgccgcgcggcatcgtcgagagcacgtccgtgaggatgcgcgcgacgcgcccgccctcgagcgagccgcagtagaagatctccacggggctcgtcgagagcacgtcgtggtagcgcatcgtgagcttgcggtagtggatgcgctcggcgtccgcctcttcgccgaggcggggcacggcgtagtcctcgcagcagcacatgtgggcatacagccgctcgatagcgtaggcgcgcttgttgttcatgccggcgcggatgcgctcgagcagcttctcacgctcgctgtccacgatatccggccgcagcaggccgccgcgcgtgttcgggtgcagcaggaggtctgccacgtcggccgcgagccgggggaagatctcctcgcccaccgcgccgtcgtcggcaaactcggcctcgaagcccacggcctggatctcgccgagcttgcgcacgctcggcgtgatgctcgcgccgtagaggcgctcgagctcggccgcgatcgtctccagatcgggcaggcgcgtgctgccgcgccgcagcacatacggcagcacggccgtgcacgccgccgtttctcgccgcagctgcgtcagcaggttcacgctcagccacgcggtcttgaacttgtccgtgcgcagggcggtcagccacacgccggggagaatttccgtgcggatgcgttccataagatacgctcctttcgcctatggtgtgtccatattttttgaatactttattatatcacgccttacctatcttgggaatagggtttcgggcgctttttgccgatgccgccgccgtcgtagggcgcattgtccacggtcacgccgtcgggccgcaggcggacggtgtgcagcagacccgctccgtcgcgccagcgcacggtacactccggccagccggccggcaggtgcggctcggggtagagcacgccgccgcgcaggtgcagccccagcagatcttccgccgcgatgcgcaggtaccaccccgccgcgcccgtgtaccacgtccagccggcgacgcccgcgttatccccgcccgcaatgtcggccgcgagcacgtacggctcgccctcgtagcgcgcggggtcgtgcgccgcgggcagcacggcgtgcaatatttctacgccctcggccgtgcggcccgtgcgcagcagcgccatggccagccacagcgcgccgtgggtgtactgcccgccgttttcgcgcaggcccgcgccgtagctgcgcacgtagcccgtctcgggcgtgcgccgcgtgatgggcgggtcgaacagccgcaccacgttgtgctcccggtcaaagagctgctccaccgcgctcgtgagcgccgtgtgcacgcggccgcggtcggcgtgcgtgtcgagggcggcaaacgcctgcgcgatcgcgtcgatgcggcactcgccgcacgcttccgagccgagcggccgcccgtcgtcatagtacccgcgccggtaccacgcgccgtcccacgctccctcggccgcgcgcgtgcagtggtcggcggcgagcgcgagctgttcggccgcgtgcccgcccacgagggcggcaaatttccgcgccgtgatggcaaaaaaccacgtcagccacacgctctcgccccggccctgcgcgcccacgcggtcaaaggcgtcgttccagtcgcccgtgccgatcagcagcagcccgtgcgcgcccacgccgcgcgcgagcacgcgcatcagcgcccggcggcagtgctcgagcaccgtgccggtctccgcgcctggctcgagcggctggtagcggtcgtgctcgttttcctccagctcctcgcccgcgaggaaggggtactcggcgcttaagatctcggcgtcgccggtcttttccacgtactcgcacaccgcccacggcagccacagcaggtcgtccgaaatgcgcgtgcgcacgccgtgctcgggtcccgtgcccgcgtgccaccagtggcacacgtccccggcggcgaactggtgcgcgcacgcgcggccgatctgctcgcgcgcaggcgcgctgtcgagcagcaggaggttcaccgcgtcctgcagctggtcgcggaagccgaacgcgccgccgttctggtacaggctcgtgcgcgcgagcagccggcagcacagcgtctggtacgcggcccagccgccgagatagcggttcatgtccgcgtccggcgtcgtcatccacaggcgcgacaccgcgcccagccaccgctcgcgcgttgcgcgcagggcgtgcgcggcctcgtccggctgcgtcaggcgcaggagattcgcgcgcgtgtcgcacccgcagacgatcacgccctgccggtcgatcacgccctcgagcgcgaagcaggggctcagccccgcaccggcacgcgcgtccatctgcccgcgcaggaacgaaaaccggtcgcacgtccagcccgtgagcggcatgcccgccgccgcgcaaaagagttcgggcgcgtccgcgcgcacgttttctgccgtgaacagcccgtcggcgtatgccgtcacgacggcgggggcgtccgcgtcgcgcccggcgcagacgaggtcagtgtgccacgtgatgcgcgcgcgccccgcgcactcgatgagcagcacgcgcgcgtccgcgtcctcgggcacgaacgccgtcacgcgcacggacatgccgtccacgctgcgctcccacgccgcccagccgaagccgtactccacccgcgagcgcccgtcgtcgtcaaagagcgacaccgcgcccgcgcgcgatgccatgcgcagcgtctccgtgccgcgcagcacccacgggtcgcatagccagcggttgatgcgcctggtgtgcgcgttgcggtgccacatgtggcccgtgcccgcgtccgtggcgagaaagccgaagcgcccgtttgtcagcacctggctccacgcgcgcggcggcagcccggtgaaggacaccgtgccgtcgtcgtcccagtgcacgtcgctgcccgtggacagataccgccggtcgcccggcgggggcagcagcggcagcgtgcagcgcgtgcgcgccatgccggggcggatggccgcggccgccgccacggcggggaaggcttcctccggcacgaggtgcacgccgccgggcgcgccgagcgtgtgcgcgaggtcgagcgccgcgagccacccgcgcacctttccggccgtcggctgccggtagtccccgccgtcgccgctgcgcagcgcaaggtcgcacgccacgcccagcgcgcgcagcagtgcccactgccgcaccacgccgcgctccgcctgcgcgcaccacaccggcaggtcgcccgagatgccctgcgcccagagcgccgggcgctcgagctgcccgggcgctgcgtccgccgccacggccggaaacagcaggggagagaccgccgccatcgcgccgtcgagctccgcgcccgtcatgccgtactgcgcggcgagctctgccggcagcgccgccgccatcgccggcggcagcacgagcgcgcgctgcgccgccgtgaacgcatcgtcctcgcgcgcgcccacgccgagcgcaaagcgcacgcgccacggcgtgtccggcgctgtgtgcaccggcacgctcagctccacgcgccccgcgcgcagccaccccggcaccggcccttcggcccgccacgtgcccggccggtcgcacgcggcgcacagccacgcctccggcttctcgccgcggccgaggtgccgcagcagcagcgcgtcgcgccgcagcacgctctgaaagcccagccgcgcgaacgccgggtggttgacataatcctcccacggtgcgagcacggcctcgaacacgaaccgcaccgtgccctcaatcccgctcggggacgagagcgtcagcgcgcgcacctcgccgttggcgcggccgggcacggtcagcgtctgcacggcggtcacgtccccgtgccgggcggtgaactgcgctgcgcgcaccgtaaagcgccactgcgcgcccgcggccgtgcccggcagcagtgggccggagaaatcgtccgtctccagccgcacgaccggcccggcggcggggtctgcgcgcgtgccgcggcggcagacgctcagcgcgtgccagcgcgcgaagctctgcccggcctccgatacggcgaggcagtacgtgccgttggagagcagcgcgcagcgcggggcttcggcgtcgatgcccgtgccctcggccgcatagtccggcagggcgcggcggcgcgccttttcggccggctgttctgcgcgccgccgcagcgccggcgcacccagtggcagccgctcggacagcaaggtcgcgtgcgcgcgcatggcggggtcggcgaaaaaccaccgccgcacctgatctccgcacagcgcgttgcacgccgccagcaggctcatgccctgatggtgcgccatcacgcagcgcacgatctgcccgccgccgcccgtgcgcgcgcgggtgcagtcgagcgcgtcgaaaaatccgtgctgccccagcagtccgagcgccgcgagtctgcgcaggttgcgcatcgccgcgcgcggctcgaccgccagcgcgagaaagctgctgtacggcgagagcaccagttccctgtccatgcccggctgcagggccagcgccgcgcagccgtgcgccttgtagcggtagctcagcgcgctgtcgagcgcgaagtacgcgctctccgacacgccccacgcctgccccgggcgcacgcgccgccgctgcacgtagaggcagaatttcgcgctctcccacagcagcgagtcgcgcaccggcggcagaaacagctccggcatcaggtactcgaacatcgaccccgaccacgacacgcagccgcggtagtggtctttctgcacctgcgcgcgcgacagggcgcgccagtgctcgcgcggcacgtcgccccgcgccacggcgaagtaagacgtcagccgtgcctcgcttgagagcagatcgtaatagctctccgaccatttgccgctgccggtgtcgatgccgatgtgcatcagccgccgctgcgggtcgtagagcgggccgaagtccatgccgtcgcagagcatctgcgcccgcgccgcaagctcgttctgcccccagccgcgcagggcgttcgccgccgtgagcagggcggcggcgcagttgccgctgtccactgtggacacgtacagcggcggcatcggccgcagcgtgcacgtgtgataccagttgtaaaagtgcccgttccagcggggtaattgctccatggtcgtgagcatccgctccgccagcgccagcccctgcccgtcgtcgatgcccagcgcgtgtgcgccgagggcggacacgagcgcgagccccatgttcgtcggcgacgtgcggtgcgccgtgccggtcggcggctgggactgcacgttgtccggcggcaggtagtgatcctcggccgtgcagaacgtctcgaaatactgccacgtcgccttcgcccagcccagcagctcccgctgcgccgcgcgcgatagcggcgctgccccggccgcgttcggcgcgccgagcgccgccagcacgaagggactgagcatccacacgatgccggcggccagccccgtcgggctcggcgtcaggacggccgtgagcaggcccagcgcgctcgccggccagagcgcgcgccaatatgcgcccagcccgtcgcgcctgcccgcgcgctgcgccgccgtctgccactgcaggaggtttcggtgcgacacggccatgcgccacagcgccgtcacgatggcggaggtgttcaaaattgcctcccacggcagcaaaatcagccgcagcaccgtctgcgccacggcgctggccagcccgtgcagcacgtcgctgtggtagcgcacgcgcgtgtccgccgggtgcacgatcggctggccgagcgcgcggatcagcccctgcgccagcgccagcagcgccgcatacgccgccagccgcagccccggccagcgcagcacgcagccgaggaagatggaaatccacgtcgccggggcgacgagcgaccgccgcaggttgtccgccagccggaaccggtcgatcgggtgcagcgcccgcccgcgccgggagaagatccacggcgcgttctgccagtcgccgcggatccaccggtgcgcccgcgcgccccaggccagcggggcggcggggaaggtgtccgtcagctccacgtcgccgagaaagccgccgtgcaggtacgcgccctcgagcgcgtcgtggctcagcacgcgcccttcggggatgaccccgccgccgcagcagtcgagcagcgcgcgcacgtcgagaatgcccttgcccggaaagccgccgcggtcaaagcagtccatatataattcgccgcacgcgccgccgtaggggtcggcgccgcccggccctgcgaacacgcgcgcccagtccgtggcgttcgcgctctgcagctcggtggccatacgcgggtgcagcaggccgtagccgcgcgtgaccacgccgcgctgcgcatccaccacggcgcggttgagcgggtggagcatcgcgcccacgagcgcgcgcgccgcgccgggcgtcaggcgcgtgtcggcgtcgagcgtcagcaggtataccgtgccgctcaggcccgccgcgtccccggcggcgcactgcagcgcgcccggccggtcgagcaccagccgcgccagctccagtaatgcgccgcgcttgcgctcccacgcgctccatttcccgtcgggggtctgtacgcgagggcgtgtgaagagataaaaccggctgccccagcgcgcgttgagcgcggcgatctccgcgcgcgccgcgcgcaggatggcggggtcgatgggcgcgtgcgccatgtccgcctccggcaggtcggccagcaggccgaacgtgagctgcccgagcgcgtcgcggttgcagaggtagtattcctccagccgcgcgcagagcgcgtgcgcgtcgtccggggaggtcagcagcgccgcgatcacgcacagcgtccgcccctccggcgggatgccccggcgcagcgccagccgcggcacgaagcgcggcttcgtcacgcgcagcaataccgcatcgagcaggcccttgaccacctccgacaccgggatcagcagcagcaccgcgcccgacacgctctttgtcgcaaagcccagcagcagcgacaaaaacagcgtccccaccacgacggccgcgatgtaccacccgccgtcgcgccgcttttccggcgcgccgagcacctcgcgcagcaaaaaccagcccacgtgccgccgcgcgccctcgctgcgctgcgcgcgcgcgagcacgtcctcggcgatctcgatctccgtccggcccgtccgccgcgccagccgcgccacggtctgccggtagtgcgcgcgcgtggccgcgtccatcgcggggtagacgcccaccgggtcgcgcgcgaggatgcgccccacgcggtcgcaccgctcggagagcatgccccacgccgccgtgccgagcgcgcgcagcgacgtgaagagcgctggcgcggccgcgctgtccccggcatagctctccgccagcgcgcacaccacggccgcctgcagccccggcacgagcagggcaagctccgccgtctcgagcggcagcgcgtcctgaaacccctccagatacgcctctgccgccttgaccgtcagcgcccccccgcacgcgcgcagcagccccgcgcagcatgcgcccagcgcggtctgcccgccggatgcgcgcacgcgcgcgtgccgcagagcggccacggcatcgcccgccgcggcgcaggcaaagctccggttgtcgcgcagccactggccgttcggcgcctcgggcgtgacggcgcgcgccatgcgcgcgagcgcttttccggcgcgccggatgcgcccggtgtccgcgcgccgccggccggtcacggtcagggcgcgggcgtcgcgctcgccctgtgcgcgcagggcggcagtgttggtttcggccatgaagatccctccagaaacggtttgcaataccggaatttttcccatccggcgcgagaactatgcggtgacaagaaaaaatgcttgacacccgcgcggaatgcgcgtatactactcgtgctgtaaaggaaaaatggtttacagcgaggagggaccccactatgccggacgagaccgtgtggcgcacgatgctgttcgatttttacggcgatctgctcacggacaagcagcgggagtattacgacctccattataatcaggacctctctctggcggagatcgccgccagcagcggcatttcgcgtcagggcgtgtgggacaacatccgccgcgcggacgccgcgctgcgcaatacggaggcccggctcggcctggtgcggcgcttcgccgcgcagcgtgcagccgcggccgcgctggaggatacgctcacgaagctgcgcgataccgtcggcggcgacgctaggctgctggccgagcgggcgctgcggcagcttcaggatctgaaaggatagataccatggcatttgaatccctgtcggacaagctgaccgaggcgttcaaacgcctgcgcggcaagggccggctcacggaggccgatgtaaaggaggccatgcgtgaggtcaagctcgcgctgctcgaggcggacgtgaacttcaaggtcgtcaaggactttgtgcgcaaagtgaccgagcgcgccacgggcgcggatgtgctcgagagcctctcgcccgcgcagatggtcatcaagatcgtcaacgaagagctcaccgccctcatgggcagcgagaaccagaagctgaacatcagctcccagtcgccgagcgtcgtcatgctcgtcggcctgcagggcgcgggcaagacgaccaacggcgccaagctcgccggcctcatgcgcaagcagggcaagcgcccgctgctcgtcgcgtgcgacgtgtaccgtcccgcggccatccagcagcttgagaccgtcggccgccagctcgacattcccgtgttccagatggggcagggcgacccggtcgagatcgccaaggccggcatcgagcacgcgaaaaagcacggcaacgacctcgtctttctcgacacggccggccgcctgcacatcgacgaggcgctcatgaccgagctgcagaacatcaaggccgccgtcaaccccgcggagatcctgctcgtcatcgacgcgatgatcggccaggacgcggtggcgaccgcgcaggcctttgacgacgcgctcgatatcaccggcgtcatgctcacgaagctcgacggcgacgcccgcggcggcgccgcgctgtcgatcaaggcgctgaccggcaagcccatcaagtttgccggcatcggcgagaagctcgaccagatcgagcccttccaccccgaccgtatggccagccgcatcctcggcatgggcgatgtgctcacgctcatcgaaaaggccgagcagaacctcgaccagaaaaaggccgaggaaatggccgagcgtctgcggcagaaccgcttcacgctcacggattattacgaccagctccagcagatcaagggcatgggctctctgcaggacatcgccggcatgatccccggcatggacgccaaggccctctcgggcgcgaacgtcgacgagaaggccatgggccgcatcgaggcgatcatccagtccatgacccccggcgagcgcgacaaccccgccatcttaaactccagccgcaaaaagcgcatcgcggcgggcgcgggcacgagcgtggtcgagatcaacaagctgctcaagcagttcgagctcatgcagcagctcgtgcgtcagatgtccggaaacagcaaggccatgaagcgtatgaagcgcggcggccgcggcggactcggcgggctgggcaatctgttcggcggcggcggccgtccgtacggattctaaattggttccaagctcccgcagggagctggagatacagagaactttgatggaggtgaagatacatggtcaagatcagacttcgcagaatgggcgccaagaaggccccgtactaccgcatcgtggtggcggactcccgtttcgcacgcgacggcagatgcattgaggagatcggcacgtacgatccgctgagcacggataagaagatcgtcgtcgacgccgagcgcgccaactactggctcgccaacggtgcacagccgacggataccgttcgtgtgctgctcaagaaagccatcgcagcggaataaggagagaccccaaagatgaaagagcttctgacctatattgtgcagaacctcgtggaaaaaccggacgaggtctctgtgaccgagcgcgaggccaacggcgagaccgtgtttgaagtgcgcgtcgccgacggcgatatgggcaaggtcatcggccgtcagggccggatcgtcaaagagatccgcatcctgatgaaggccgtcgcccagagaaagggcaagaaagtctccgtggagatcatggattgacgcaggaaacgcgctgcacccgtgcagtgcgttttttgcacctacacccaaaaagggggacaaccaacgatgcaaaaaccgtatctggaggcaggaaagatcgtcaacacgcacggcgtgcgcggcgaggtgcgcatccagccgtgggcggatgacgcggcgttcctgctcggcttccggacgttttatatcgacggcgcgcccgtgcacgtcgcgcacagccgcgtgcacaagggcatgctcgtcgtgaagtttcagggcgtggacgatgtcaacgccgccatgacgctgaaaaaccgcgtcgtgtccatcgcgcgcgcggacgtcacgctgcccgacgggcagtatttccagcaggacctgctcggcatcgctgtcgagaccgacacgggcgagaccctcggcacactgcgcgagatcctggacctgccgcgcggcagcgtctacgtcgtgcagggcgaccgcgaggtgctcatccccgaccggccggagttcgtgcgcagcatcgaccccgccgccgggcgcatggtcgtgcacctgatcgaagggatgtgagcgcgtgcgcatcgacattctcaccctctttcccgacacgatgcgcgccatgctcggcgagagcatcctcggccgggcgcaggcgcgcggcctgctcgatatccgctgccaccagatccgcgactataccgaaaaccggcaaaagcaggtcgacgactatccctacggcggcggctgggggcaggtcatgatggcgcagccgctcaaaagctgcctcgacgccgcgctcgcggacagcactgtgcccaaagcgcgccgccgcgtcatttacctctccccgcagggggcgacgttcacgcaggcgaaggcccgccagctcaaggccgactatgaccagctcgtgctcgtctgcggccactatgagggcgtggatgagcgcttcatcgaggcgtgcgtggacgaggagctgtccatcggcgactttgtgcttacgggcggcgagctcggcgcgatggtcgtcacggactgcgtctgccgcatggtgccgggcgtcctgtcggacaccgagtgctacaccggcgagagccattgggccggccggctcgagtacccgcagtacacccgccccgagacgtgggagggccgcaccgtgccggaggtgctgcgcggcggcaaccacgcggaaattgaagcctggcgcacgcgccagagtctggagcgcacgctcacaaagcggcccgacctcttccaacagacgcccccgacgccggacgagcagcgcctgctcgataagatccggcgcgaccgcagccgcccgcagctgacagagccgcccgtctgccggatagcaacggaggacgacctcccggccatccttgccatcgcgcagcaggcgcgcaactatctgcgccgccaccgcgttgaccagtggcagggcgcgtatccgaacgaggacaccttccgcgccgacatcgcggccggcacgtgccatgtgctcacgtatcagggtgcggtcgccgccgtgtttacgctcaccttcgcgcccgagcctgcttatgacgcgctcacggacgggcgctggcgctcggatcgggagcacgccgccgtgctgcaccgcaacgccgtcagcgccgattggcgcggtacgggcctgtccgacctgctcatgcaggaggtcgagcggctcgcgcgtgaaagcggcgcgcacgccgtgcgcgtggacacgcaccggcacaacggcgcgcagaaaaagctcctcgagcgccacggctaccgcttctgcggcaacatcctctgcgatgagccggggcgcgatccgcgccgtcaggcgtttgaaaagctgctgaagtgagggcctgcgtatgaatctgacaaatctcacggacatccgcgcgctgctcgcgcggcacgatttccgcttttccaagtccctggggcagaactttctcaccgccgcgtgggtgccggccgacattgccgacgcctccggcgcggacgcgcgcaccggcgtgctcgaggtcggcccgggtatcggctgcctgaccgagcagctcgcgcagcgcgccgggaaggtcgtctccgtcgagctcgacgagcgcctgcgccccgtgctggccgagacgcttgcggggtatgaaaacgtggagctcgtctttggcgacgtgctcgcgctcgacctgccgcagctggtggccgagcgcttcgccggcctgcgccccgtcgtgtgcgcgaacctgccgtataacgtcacgtcgccgctgctcacggcgtttctcaccgccggctgcttcgacaccgtcaccgtcatgatccagcgtgaggtcgcgcgccgcctgtgcgcccggcccggcacggcggattacggcgcgctgaccgtgttcgtccagtggcacgccgagccggagctgctcttcgacgtgccgccgcactgctttgtccccgcgccgaaggtcacgagcaccgtcgtgcgcctgcgcgtgcgcaagtccccgcccgttgcggtgcaggatgaaaagctgctgttcaccgtcgtgcgcgcggcgttcaatcagcgccgcaagacgctcgtcaacgcgctctcggccggcgtgcccggctgtgacaaggcgcgcgccgccgcggctgtcgccgcctgcgggctcgatgcgcgcgtgcgcggcgagacgctcagcctggcccggttcgccgccctgagcgacgcgctcggcagcgagctcggcaatggcgcaggttgacataacgaaatgaaacaggccgttccatatcaggaacggcctgttttctatgcatttatgttgatttatagtttacataatgcagcgcaccgaacgcacagcaaacaaccggcagcgatgttggaaagcgggaaagcccgagggggcaacgcccgccttgggtgagatcgtgcatcgcctttggcgctgccttctccttgccgagagggtgctgagcgcagcgaagcggatgcggtggaaaggttctttcactgccagtgccgccggtgttgcccatccatccccgcataccgcccgccatccccgcatacgctggtagcaaaccagaaccgggaggggagcctatgccatacgaggacaagaaggccgcgccgcagcgccggccgcacgcggtcacgctcgacgagcgcagccatctgaccgtcacgggcgtggacgaggtcgtgcgcttcgacgacacggaggtctccatgcgcacgtcgcgcgggatgctcaccgtgcacggggaggggctgcgcgtcggccgccttgcgatcgacacgggggagctggccatcgacggcgcgtttgacgcgctcgactacacggaggagacggcgtccggcggcggcttctggtcgcgcctgttcggcggatgagcctgcacccgctcgcccagctcgggcaggtggcgctggcgctggggctcggcgcggcgctcgggctgctgttcgatgtgctgcgcgtgccgcgccgccatgcgcgccgggcctttctccgcgcggtgctcgacgccgtgttctgcctggcggtggggctgacggtgttcgccttcggcatggcggccggctcggggcaggtgcgcctgttcatgtttctcgccatcgcggccggctggacgggctactttgcctgggtcagcggacaggttttgccgccgctggagcaattttcccgccgctgcgcgcaaaaaacgcgccaatttgccgcccccggacagaaatttgcaaaaaaagtttggatttttgcaaaaaaacgcttccaaaatcgccgcagatgttttagaatagactgtattactggaagcagatacgatccggggggaggttctgcagactgtgaaattcaaaaaggcaagcatctttacaacgctggtcatcgcggtgctgatggtgtacgcgctcatcagcctgtttgtggtgcaccggcagacccggcagcttcaggatcgcgcggcgacgctgcagcagcaggtgtccgaaatgacccaggccaacgccgagctgcaatatcagatcgaccacagcgaggacgacgacatgatcgagtcggtcgcgcgcgaaaagctcggtctggtcaagcccggtgaaaagattttttacgacacgagtgattgagcaaggagaaacgaaccgtatgcaggtggaagtcggagcagttgtggagggtaccgtcaccggtatcacgaagtttggcgcgtttgtgagcctgccggacggcaggagcggtctggtgcacatatccgagatcgccaacacctacgtcaacgacgtcaacgagtttttgaagctgggtgatcaggtgaaggtgcgcgtgctggccgtgacgccggatgggaagatcaatctgtccatcaagaaggcagagcccgcgcccgagcgtccgaacaaccgcccgatgcacggcggccgcccgggcggcagccgcccgaatcataacggcggcgcaccgcgcgccgcgcgcccgaacaaccgttcggcccagccggcgggacaggtcagcggcccgagcggggacgctgcgtttgaagaccggctcaagcagttcatgcaggagtcggacagccgcatggccggcaaccgcctctacagcgaccgcacgcgcggccgccgccgcggcagcggccgcggataaaaccaaagacggcatcaggccccactgcgtttgcagtggggcctttttccgaaggaaggagcccatcatgcaggtctacttgagtgaacacatcgcgccgtcggcctatgcccggctcgcgcgccattttgagatcgtggacaatttcgaccaccccgagcagctcgccgccatgattatccgccgcgcggtcgtgccgcgcgcggtcatcgcgcgcgcgccgaacctgaaggtcatcgccatgcacggcgtcagccgcgacacgatcgacaccgctgctgccgccgagtacggcgtgcccgtgccgaatgtgccgggcctcggcgcgccggccgtcgcggagctggccgtggcggatctgctggcgcttaaccggcaactgaaatttgtcaacaacggcctgtgtgccggccgcttcgaccacttcggcgcggaggagtttgtgtgccacgagatgaccggccgcacgctcggcctcgtcggcacgggcaacatcgcccaccgcgtggcggacatcctgcgcgcggcgttcgacgtgcgcgtcctgtgctggaatccgcggcgcacggccgccgagtgcgccgcctggggctatgagcaggtggcgacgctgccggagcttttccgccgttcggacttcgtgaacgtgagcatcacgctctgcgatgccacgcgcgatctcatcaacgcgccggtgtttgccgccgcgaatccggacctgctgctcgtcaatacttcgcgcggcggcatcgtcaacgagcacgatctctatatcgccctcaccacggggcagatccgcgccgcggcgagcgacgtgttcgtgcacgagcccccggcgtgtgatgacccgctcatccatctggataactttatcgcgaccttccacatcggcggcagcacgtatgagtcgctcgagcgcgtgagcaaccgcgccgtggactacgtgttcgaatataccggcgtgcccgagcagaaggaagtcataggatcctgacggggtctccccggtgtaagggccgcggcagaaagccccggagcatttctgctccggggctgctgcaaaccagatcagtcgatcggcatggtcagagagtttgcgatctcctgcacgatttcctgtgcttcgtactccttgcagatgccgagaattttcgcagtcagttccagagcgccatacaacatagtctgtttacccctttcgtcagatttccaatgccgccgcacacattcggcgacaccggatggttgatattaccggttacaaggccacaatacccgaaaaacaggaaaaacgcaacggacaaataacgaagaatgtaacgtttagatgaaattcgcaactgtttgtcatttttccagtaccaccggcggctgcagccgttttctgtgcgcttcgatgctgcgggctgtgtagggcacgcgggaagcatccgtttttccgacaaaaaaatcccggagccgaagctccgggattttcctatgctgtttttacatggcgagccagttcggcagcgcatcggagatcgcatcaacgatcgccttcgccttgtcctcaccgcacttgccgaggatatcggaagcgatgccaagaccagtctgaataagacccatgttactttacccctttcgtaagatttccaacgccgtcccacacaatagacgacatcggatggttggtattgccggttacaagtgcattatatgcaagaaacggccaaaactcaatggacacatgcccacgatgtgtaacaaattgattgaatttgtcatgaactttgatgtcaaattgttgtcaaatgcaattgccgttctgctgctcgctttttcgactccgatatggatacctgcgcgccggttgccgggtttcgcggccaaaatcggcgttatggaaaccatttttccacattgccaacagacttttcaacataaatgcggtgcaattaacgatgttatgtaaacaagccgctgtttcccatggcctttcccggccctccgcggcggctctgccggccgggcacacctgtccgccgcagccgcacatttttgcctgcccgcgctgtcccgcaccgcgcgctccgctcgctccgtctgcccgcgctgcctgcatcgcaccatcctgcaccgcgccgccctgcaccgcgctgcgcgccccacacaccatcccacaccgcgcgcaaaagccccgggagcgttcgctcccggggcggggtgctatggggcggcagtgccggctcacgcgccgatgagctggcagtagcgcatgatgatggtggccgtctgcgcgcgcgtggcgctgccattcgggtcgaggtagtccaggccgttgtcgtgcgcattgccctggatgaggccattgccgacggcccaggacatcgcggcgtaggcccagttggccacactgtcggcatcggggaaggcgctgatcggcgcggcgttcccggtgaattccggcgcgtacttgaccgtgtaccggtacaggaacgtgaccagctgctggcgcgtgatggcggcgttgggcgtgaacatagtcgcgctcgtgccggaagtgacgtcgttgtagtacgcccaggcgacggcgttgtagtaccacgcgccgggggcgacgtcggtgaacggcaggtagtagtagctgtagtcggtctgattgccggagaggttatagaggatcttcacgatctgtgcgcgcgtgcaggccgtgtctggcgagaacgtgcccgcgccgacgccgttcatcagcctgttgcgcacgcagtagtcgatgcccttgtgcgcccagtagtccggcccggccacatcgtgcaggccgtagctcgggcagctcgggccgccggtgcaggtgcttgcgcctgtggcggggatggtctcctcgcggatatcgccgcagacggtgcaggtgaaggtgcgcacgccgggggtggtctcggtcggggcggtggtcacggtgccgccgtcccacttgtggccggccgcgtcggtcaggttgcgc

SEQ ID NO: 13975 - DNA, 46708 bp, Unknown
  gut microbiota DNA sequence
aaccaaaattaagaaaaaatattgatatttcagtatatttttatatttatttatcatttatgtaaatatcattatgtaaacatatcgcataataaccagccccgcgcaaagattctcgcgcggggctggggagcctggtgtattttccggtggctttccggcgcgctcgactgcggcgcgccaaggccgccccttcggtgcggcgcgctgcggctgtccggccggccttggcgcggccgtgtgccggggtgcgctgcgtacccgccgcacaccccggcagccttatgcgtactcgaccttgatggtgttcgtgttgccgctgcggccgttgatgatgccgccggtgatgatgaccttgtcgcccttttcgagctgcatcacctgccggctgacctgcagcgcgtggtaaaacagcacgtcggtgctctcgtacacctcgctcatgacgggcgtgatgccccatgagagggcgagcttgcggtaggcgcgctcgttcgtggtcaggccgatgatgtccgtcgggccgcggaagcgcgagatcagccgcgcggtgcgccccgtgatggagcagacggtgatgaccttcgcgccgatgtcgatggccatgccgcacgtggcgtggctgatggcgtcgagcgtgtcgtggatctcaaactgcgtcttggggaaacgtttggcgtagttgatgtgcgcctcggtgtattcggcgatgcgggccatggcgctcagcgcctcgacggggtgctcgcccgcggccgtctcgccggagagcatgatggcgctcgtgccgtcgtagacggcgttggccacgtcggcgatctcggcgcgggtggggcggatgttgtgcgtcatgctctcgagcatttcggtcgcggtgatgacgcgcttgccaagcaggcggcacttgccgatgagctccttctggatgctcggcagctcctcatacggcacctcgacgcccatgtcgccgcgggcgatcatgatgccggtgcactcggtgaagatctcctcgatgttgtcgatgccgggctgattctcgatcttggcgatgacggagatgtcctcgccgccgttggcgcgcaggaaggcgttgaggtcggccaggtcctgcttgcgcgacacgaaggacgcggccacgaagtccacgtcgttttcgatgccgaagagcaggtcgctcttgtcctgctcgctcaaaaacgtctgcttgagcaccttgttcgggaagctcatgctcttgcggtccgagagcacgccgccggcggtgacgcggcagatgacgtccgtgtcggtcgtggcggtgacggtcagggcgatgagcccgtcgttgacgagcacggtgtcgcccggctcgagatcctgcgcaagcccggcgtagctcacggacacgcgctcggcgctgccggtgacaggttcggtcgtgaatgtgaacgtgtcgccgttgtgcagctcgatcttcccgccctcgaacgtgccgatgcggtactccgggcccttcgtgtcgagcatgatggcgatgggcaggtcgagctccgcgcgcagctttttgatccggtcaatgcgcacctggtgctcggcgtgcgtgccgtgggaaaagttcaggcgcgcgacgttcatgcccgcgagcatcatggcgcgcagcgtctcctcgctgtcgcaggcggggccgatggtgcagacgatcttcgtttttctcatatccgactccctctccgcatgttgcggtttactttttcttcttgccgaaccagcggcgctccttgcggttgcggccctcgggctcgtcagcggcggtgatgttccgggcggcctcggccacggcgtcggcgtcaaagtcgacgcccatttcggccgcggtgttgcgcatctgatcaaagaactcgagctgggccttgagcgtctggagcatttcgcgcgtgagcgcaaggccgctgccgacgccggggtcgatgatgatgccggtgtcgttcgaggagagcacgagcggggcgtagtccttcacgccgagctcgacgctgcccatgttgcgccactgcagcaggcgcgcgcggtcggtgaacgcgcagaagaacgtgcgcccgtcgtcggtgcgcaccttgccgaactgcaggtgctgctggccgtcggccggggcagcttcgccctcgggccgctgggcggggaagaacagcggcgccgcgatcatggtcgcggccaggcgctggaagttctccttcgaggcgttgatcttgcacgcgtcgagcgcgtcgcgcagatcctcggccagcgcggcgcgcatggcctgctcgggcgtgcgctcgctgagctcgatgtggaaatcggggtaggccacgcgcagcatgtccagcgcggtgctcaggccctgcacgtcttcgtcggggcggtcgttggcggccacgacgaacaggcgcgggcggtgattggcgctgcggtcgacgatgccggaggcgtagagctcctcgagcttcgtctggatgcacagggcgatgcagttggggcgctcgctcgtggcggtcacggcgatggcgtaggtctcgtcgccgtcctgcacgggcattttcgccgcttcgagaatgtgcgggcggccgagaccgtaggcggcctcggccttgtgctgctcgcgctcggcgtcggtcatgtcgtcgatgttgtccggctccgtgtaggcgccggcggccagcagctccgccacggccttgcggcggatgtcctgaatgccgagcagctgcatggcgcgcgagcggtcggcggcgacgtggtcgtacagatcgttaaaattactcatatgcttccttcccgggacgcctgggcgccccttggttttctttgccgccattataacacaccccgcgccaaatgcaaagcgccgattcaccgcggcagattgcacaaacattgccgcagggcgcaaaaaaatttcttgccgcagatcgccggtttctctttgcaagcggcaaaaatgttgctataatgattttgtatggaaacttgggttttggcgtccgcacgcaggacgcggagattttcaaaaagagaggaagttacgatatgattccacacggcaaagagatcaaggtgttcaccggctcgtccaaccccgacctggcggacatgatctgcaagaacctcggcatctccctgggcaagagcacggtcacggcgtttgccgacggcgagtgctccatctccatcaacgagcccgtccgcggcgtggacgtgttcatcgtgcagagcacctgcaagccggtcaatgacagcctcatggagctgctggtcatgatcgacgcaatgaagcgcgcctccgccggccgcatcaccgccgtcatcccgtatttcggctatgcccggcaggaccgcaaggccaaggcccgcgacccgatctcggccaagctcgtggcgaacctgctcaccgtcgccggggccgaccgtgtgctgaccatggacctgcacgcagcgcagatccagggcttctttgacatcccggtggacaacctctacggcgcgccgctgtttgccacacactacctgcgacgcttcggctacggccgcgaggacatggtcgtcgtctcgccggacgtcggcagcgtggcgcgcgcgcgctctttcgccatgaagatgggtctcggcctcgccatcgtggataagcgccgcgaaaaggccaacagctccgaggtcatgaacatcatcggcaatgtcgagggcaagacctgcctgctgctcgacgacatggtcgacacggccggcagcctgtgcggcgcggccaaggccatcgttgaggtcggcggcgcgaaggaagtgtacgcctgcgcgtcccacggcgtgctctccggcccggctatcgaccgcatcaacgacagcgtcatcgacgagctgctcctgctcgattccattccgtatccgaaggacaagccggcctgcgacaagatccactatctgcccgtcgcaccgatgttcgccgaggccatcaaccgcatctatgaagagatgagcatctcctcgctgttcgagtgatgtttttttccgatcacggcggcgtgcagtggctggtcgtgttcctcggcaacccggggctgaagtatcagaatacacggcacaacgcgggctttctcacggcggacgtcgtggaaaaggactgcggcgtgcacatcgaccggctgcgctttcacgcgctcacggcacaggcggagctcggcgggcagaaggtcctgctcatgaagccgcagacgtttatgaacaactccggcgaggccgtggcgccggcggcgaagttttataaagtgccgccggagcatatcctggtcgtgtcggacgagatccacctgcagccgggccgcctgcgcatccgcacgaagggctcggccggagggcacaacgggctcaagagcatcatcgcctgcctcggcacggacgcctttccccgcatccgcatcggcgtcggcgcgcccccgcacccggactatgacatgcccgactgggtgctcggcacgttccgcggcgaggacaaggccgccatggacgacgcggccgtgcgcgcggccgaggcctgcgcggtctacatccgcgacggggcggaccgcgccatgagccgctttaactgaacacctgtcaggggtttcccacgtccaccggaaccgccgcagccgaccgtgggggcattgccgccgggccgcgcgcgaaaccggtcgatgcgcgggagacccctgatctattcgcaactggagaaaaggaggagcgcatcccttgaaaaaacactgtatcgccatgctgctcgcgggcgggcagggctcgcggctgtatgccctcacggcgaaggtcgccaagcccagtctcccgttcggcggcaagtaccgcatcatcgacttcccgctgtccaactgcgccaactccggcatcgacaccgtcggcgtactcacgcagtaccagcccctgctgctcaaccgctacatcggcagcggccaggcatgggatctcgacagcatcgacggcggcgtgtacatcctgcccccgtatcagagcgcgggggagcgcgggtcgtggttttccggcacggccaacgccatctatcagaacatggacttcatcgagatgtatgaccccgactgcgtgctcatcctctcgggcgaccatgtgtacaaaatggactatgacaaaatgctccgcgcgcatgagcaggccggcgcggcctgcacgatctcggtcatccaggtgtcgatggacgaggcctcgcgcttcggcatcatgaatgtcgggccggacggcttcatcgaggaattcgaggaaaagcccgcccacccgaagagcgaccttgcgagcatgggcatctacatcttcgactggaaggcgctgcgcaggtatttgatcgaggacgaggccgaccccaactccaacaaggacttcggcaagaacatcatccccaagatgctcgccgccggggaaaagctcctgccgtaccggtttgagggctactggcgcgacgtcggcacgatcgtcagcctctgggacgcgaacatggatatgctctcgcccacgctcatcaatctctatgacccgaagtggcccatccgcgccaagagccccatccgcccgccgcacagcatcggccggcaggcggaggtcgtgcactcgatcatcaccgagggctgcacgatcgagggccatgtggaaaactccgtgctctccaactccgtcaccgtcggcgcgggcgcgcgcgtgctctacagcatcctgcaccccggcgtcgtcgtggagccgggcgccgtggtggagtatgccatcctcggcgagggcacggtcgtcggcgcgggcgcgcacgtcggcgcgcagccggacgggacggacgactggtgcgtcgccacggtcggcccggacgtggcggtgcccgccggggcaacggtcccggccggggccatgatctatgacggagcggaggtgcacgcatgagcaaggtacacggcatcgtttacgcatatcacagctccccgcggcttggggacctgacgcgctaccgcacgaacgcatcgctgccgttttgcgggcgctaccggctgatcgactttgcgctctcgtcgctctcgaacgcgggtgtgcacagcgtcggcgtcatcatgcagcgggactatcagtccctgctcgaccacctcggcagcggcaaggcgtgggatctgtcgcgccgcagcggcgggctgcacctgctgccgccgttcggcgtcaatacgcgcggcgactataccggcacggccgaggcgctcaacgcggtcatttcctacgtacgcaatattccggagtcggagatcgtgctcatgccggcggacatcgtctgcaatctcgacctcgccgccgccatcgcgcagcatgacgcctccggctgcggcatcacggctatctgccgcggcggcgccgtcaccggggagcaccaccgctacctcacggccgcgcacggccgcgtcacgaagctcatcacgagcgcgtcggccggcgcgggcgtcgccgccatggagatctacatcgtcaataaggacgtcctgctctcgatcctcgatttctgcgcgcaggaaaaccgcttccacttccaccgcgacgggctgtttgaatacctcggccgcggcggcacgatggacgtattcctgcacacgggctacgccgtgcgcgtggacgcggtcgcggactattttgctgccagcatggatatgctcgatccggacgcgcgcgcatcgctcttcccggctgaccgcccggtgcgcacgaaggagcgcgcggacgtgagcacgtactacggcgagcacgcgcgcgtggaaaactgccttgtggccgacggctgcttcatcgagggcacggtcacggactgcatcctgtttcgcggcgtgcgcgtcgcgcgcggggcgcacctgagccgctgcatcgtcatgcaggacacctgcatcgcggcggacgccattttgcagtacgccatcgcggacaaaaacgtccgcattggcccggccgtcacgctcaccggctgcgaggccctgccgatcgtgatccccaagggcagcgagctctgacccgaacgaacccagaaaaggaagattcgattttatgccaatgaccaatcagatttcccgcgatgagctgcgcggcgccattgccgacaagctcagcgcacatttcggtgtcacggccgagaacgcgaccgatgagcaggtctttcaggctgcggccatcgtcatccgcgagatcctctcgcgcctgcacacgttcgacagccgcaccgcgcccgagcgcgaggtgcactacctgtcgatggagtttctcatggggcgctccctgatgaaggacgccttcaacctcggcatcggcgacgcgctcaccggcgcgctcgaggatctcggccgcagcgctgccgacatctttgagaccgagccggacgccggcctcggcaacggcggcctcggccgcctcgccgcgtgctatatggacagcctcgccaccgagggcatccccgccacgggctattcgctgtgctacgagctgggcatcttccggcagcgcatcgtcgacggccgccagaccgaggtcgcggacaactggcgcacggccgcgtcgagctggctcgtgccgtgccatgaggacacggtcgaggtgcgcttcggcggccgcgtcgagccgcactgggacgcctacggccactaccacggcgagctgcacggctatgagagcgtgctggccgtgccgcgcgatatgctcatcgcgccgtatggcgacgggcgcgtcaacaccctgcgcctctgggaggcgcacagcccgaacgacctcgacatgtatctcttcgccgccggcagctatgtccagagcctcgagcagcgcacgatggccgaggtcatcacgaaggtgctctacccggcggacgaccacatcgagggcaagaccctgcgcatccgccagcagtatttcttcgtctccgcgacggcgcagagcattctgcgcgcccaccgcgcgcgctacggcacggtgcgcaactttgccgagcaccacgtcatccagatcaacgacacgcacccgacgctcatcatccccgagctcatgcgcctgctgctcgatgacgacggcctcggctgggacgaggcgtgggatatcgtcaccgcctgcgtcaactatacgaaccataccgtcatgtccgaggcgctcgagacgtggccgcagggcctcatccagagccagctgccgcgcgtgtgggagatcatctgcgagatcaaccgccgctggtgcgacgagctgcgcgcccgcttcggcgacgatgtgcgcgtggggcgaaacctcatcatcgcggacggctgcgtgcacatggcaaacctctgccttgccgcgtgtaagaccatcaacggcgtttctgccctgcatggggagattttgcgccgcgacctcttccgcgatgtctgcgcgctcaaccccagccgcttcacctatgtcacaaacggcatcgaccaccgccgctggctcgcccagtgcaaccccggcctgcacgcgctcgtgtgcgacgtgctcggcagcgatcgctacctcctgcacccagaggagctcgcgggtctggagcgcgcggcggacgaccccgccgtgctcgcccgtctcgaggagatcaaggcgctcaacaagcagcggctggccgcgtgggtgttccgcaccgacggcttctcgctcaacagcgacgcgatcctcgacgtgcaggtcaagcgcctgcacgagtataagcgccagcttctgtgcgccatgcgcatcacgcagctgcagctcatgctgcacgacgacccggatcagcccttccagccgcgcacgttcctgtttgcggccaaggccgcgcccggctacgcgacggccaagcgcatcatccagctgctgtgctcgctcgcggccgatgtgaatgccgaccccgtctgccgcgggaagctgcaggtgtatttcctgccgaactaccgtgtctccgccgccgagatgctcatgcccgccgcgcaggtgtccgagcagatctcgaccgccggcaaggaggccagcggcaccggcaacatgaagctcatgatgaacggcgccgtcacgatcggcacgctcgacggtgcgaacgtcgagatgttcgagcagctcggcgcggacaatatgttcctcttcggcctgcatgccgacgaggccgaggccctgcgcgccgcgggctacgacccgcaggcgtacgtccgccgcagcccgtggctgggccgcgtgctcgagcgcatgagccgcggctatgccgacggcgagagttatgccgacctcgtcagcagcctgctctacggcggcgacccgtacctgctcctcgccgactttgatgattacgccgccacgcatgagcggctgtacgccgcgatcgcagactccgccgcgcgcgcgcgtctgtcgctcgtcaacattgcccgcagcggcattttcgccgccgaccgcgccgtgcgcgaatatgccgagcgcatctgggaggtgcacgcatgaagccctatgtctgtgttgtcggcgccgtgaatctggacatttgcggccgcccggaaaagaagctcatcttccgcgactccaaccccggcgccgtcacgctcacgcccggcggcgtcgggcgcaacatcgcgcacgacctgcgcctgctcggcgtggaggtcaagttcctcaccgccttcggcggcgattcacacgcccagctcctgcgcaacgactgcgtggagctcggcatggatctcagctgcgcgctcgacgtgcccggcgggcgcacgtcgacgtatctctacatcacggacgagcgcggtgagatgcagctcggcctgtgcgatacggacatctccgccgccatcacgccggcgtatctccagcgccatctcgatgtgctcaacagcgcggccgccgtcgtgctcgacggcaacctgacggccgagaccatcacctggctcggcacgcactgcagcgccccgctctttgccgaccccgtctccgtcacgaaggcggagcggatgcgcgcggcgctcggtgcgctgcacacgttcaagcccaacctcaccgagggtcagaacctcacgggcgagtccacgcccgagggcatcgtcgcggcgctgctggcgcagggcgtgcagcgcgtgtttctcagcatgggggccgacggcatcctcgccggtacgcgcgaggagctggtgcacctgccgtgcctgcccacctgcatggtcaacacgaccggcgggggcgacgcggtcatggcggcgctcgtctgggcgtatctgcaggggctcgacctgcgcgagagcgcggcggccgccctgcgcgccggcaaggccacggtcgaataccccggcacgaacaatcccgacctcggtgcgctcgtccacggctgaggcaggtcaaaaacggcaaaaacagcaggcttccggttttggaagcctgctgttttctcatatcaggatggcgatgcggtaaacgaccgccgccgcgcaccatgccgcggcgcacgacccggccgccgcggccagcgtgccgagcctgctgccaagctcctgccgcatggccgcctgcgccgccacacacggcgcgtacagcgccgtgaacacgaggtagcttgccgccgcggctggggagaacacgcccggcagcgccgccgtcaggtcgccgccgagcagcacgccgagcgtggacagcaccgtctccttggccagcagcccggtcacgagcgcggttgcggcgcgccagtcgccgaagcccagcggcgcgaacaccggcgcgagcgcctgtcccactacggccagcaggctctcgccggcatttgccgccacgcgccacgcgggtgtgaacgtccgcagcacccacacgcccacgctcgccgcgaggatgatcgtgaacgcccgcgtgagaaattcgcgtgtccgcacccacatccgccgcagcacgctgcgcgcgttcggccagcggtagtccggcagctccatgacgaaggacgccgcctccccgcgcagggccgtccggccgaggagccgggctgcgacggcggccgccaagatgccgagcgcgtacagcgccagaaacacgacggcgctccgccccggaaagaacgcggccgcgaaggcggcgtagaccggcgctttcgcgctgcagctcatgcacggcgtgagcacgatcgtcagcgcccggtcgcgccgcgtgggcagcgtgcgcgcggccagcacccccggcacgctgcacccgaagcccagcagcagcggcacggcgctctgcccgctcagccccagccgccgcagcggccggtccattacgaaggccacgcgcgcgagatagcccgtgtcctcgagcagggagaggaagaaaaacagcgccaaaatcaccggcagaaacgccgccacgctccccacgcctgcaaacacgccctcgcgcaccagactgtgcagcagcggccccgcgtccagcgccgtgagcgcgccgtcggccgcgtccgccagccaggcgatgccgcgcgcgagcaggcggctcaggcacgggccaatgatatgaaacgtgagataaaacaccccgccgagcagccccgccatcgcggggtaggccgtgtaccgtcccgtgagcacgcggtcgatgtacgtgctgcgccggctggccggcagtgcccgcggcagggtgaaaaaccgcgtcagcctgtccacctgcgcaaagcgcgccgtgggcagcgcctcgtcgcggggcatgccgctctcgcgcaccatgcgcgccgccgccgtttcggccgccggcgcgtgcagagtgctgccgccgtcgagccactgcgtcgccgcaaacaccggcggcagccccgccgcgtgcgccgccggggcgagcagccgcgcgatcgtccgcacgcaggtctgcactgggccggacaccagcgcgcgccacgggtcgggcggcgggccgtgtgctgcctgcacagccgcgtccagcagtgcgtcgagcccctcgcccagtgccgcgctcaccggcacgaccgggatgcccagcgcccgcgccagccccgccgtgtccaccgacccgccgcctgcgcgcagcgcgtccatcacgttcagcgccagcacgaccggcacgcccagctccagcagctgcagcgtcagatacaggctgcgcgccgggcacgtcgcgtctgcgatgctgatgaccgcgtccgccgcgccgccgagcagatagctgcgcgtgacgcgctcctcgtccgagtacggccgcagcgcgtaaacgcccggcagatcgacgagcgtgatctccggccgcgcgcggcacacgctctcgctgcgcgtgacggtcacgcccgggaagttgcccgtgcgcgcgtttgcccccgtgagggcgttgaaaagcgtcgttttgccgcagttggggttgcccgcgagcgcgaggatcatggccgtgcctccttttttcggatagcacagcctatgcgcagacaaaatgcggtagacttgtacacgcgcgggatggtaaaataaagccgcggcaaatgaaaatgccgcccgaaagggcggcgtgccgtttgctgagaggattcgatcccgggcaggatgacagagcggcgggggcgctcgagggggcgaagggcccgcctcgaatgagatctgattgctgcctgtgcgcggatctatccgggcacaggcagcaaaaaagccgccctttcgggcggcttgattcggctttgacctcagcggaaggtggcggcgcagtcgcagatgtgcacgtcgatgcctttgccggcggcgtactcattgagcttgcgcatgagcttctcgcggttggcgttgacgatcttcgtggccagacgctgcttctgatcctgcgacatggtgcgcaggatgcccttgacgatgcgcgacgaggcctcgggcgtgttgcaggcgagcttgagcacggggttgatattgccgctctggctcagcgcctcgagcacgagcgggagctgggaatccagcttgtcggtataatccagactttcgatccggaaagtaacttcgatcatgataaaaactcctttgatatatacgtgaatgggcagcattatagcagaaactttttgcgatttccaccgttgcggcacaaaaaagctgacaacatttccacaatcacacgcgggaggtgacccggatgtacgataacgatcacttggatgagcaatggctgcgtcaaacgccgccgccgcgccgccgcggtgcgggctgcgggctgacgctactgctggtgctgctgcttgtgctggcgggcgcggtgttttatccgcgcatccgcgcacggctcacgccggtgccggccgtgcagatccgggtggagtcgtccgtcctgccggacacggcaccgaactgcacggccaacccgcgcacggccgccgtgctgcgctcagcgatgcgcgaccagacggacgccgcggtctacgactgcgacgccgccacgctcgaggcctgcatggcagagctgctcgatgacccggagctctgggtgcgctcctatcagtacacggtccacggcgggctgaacgcgcacatcactgttaccttcgactgggtctatcccgacgacggcccggcgcgccgcgcgcagcttgcccggacggcggacggcctgctcgccgccgccccggcgggggactatccccgcgcgctgtatctctacgactggctgcttacgcacgtgcgctacgtcgcgcgcgagacgtatgaccagacggcctacgccgccgtctgcgagggggaggccgtctgcggcggcatcgccgacgcctacgtctacctgctcgagcgcggcggcatcccggcgcgcgtcatcacgggcacgtcccgatcggctgacggcacggccgacagccacgcctgggtcgcggcggagctcgacggcgcggtctattacttcgaccccacctgggatctgcaggacgacgagagcgagacggcgctgccgggctacctcagccacacgtggttcgccctcacggccgagcgcatggccgtgcgccacacggccgacgatcccgccctctggccggacagccgcgcaaacgccgataattactacgtccgcagcggctacacggcggcggaggccaccgtcgccgccgcggctgccgccgtgcgcagccagtgggacgacgggcgcgccgtgctggagtttcgctgcgagacgccggaggtctacgccggcatgcagtccctgctcttcgaacgcgaccggctctgggatgtctaccgcgcgctcggcagctacgtgtcctcgtccggctaccagtgcgcggacgaccagcagatcatccgccttatccccgcgcgatgagcctgccgcctgcgggcggcaaacgctgcgaggctttttgatgcacaaagcgccgcagcctgtccggctgcggcgctgttacgtcgatagattatttgttctccttgtcggcgttcatgctcaggtaggcgttgatgaagccgtcaatgtcgccgtccatgacggcctgaatgttgccgttttcatagccagtgcggtggtccttggccagcgtgtacggcatgaacacgtacgagcggatttggctgccccactcgatcttgagctgcacgcccttgatgtcggagattttctcgaggtgctcgcgctccttgatctcggccaggcgcgcgcggagcatgttcttgcagttttcgaggttctggaagtggctgcgctcgacctggctggacacgacgataccggtcgggatgtgcgtcagacgcacggcggacgaggtcttgttgaccttctggccgcccgcgccggacgagcggtacacgtccatcttgatgtcctcgtcgcgcagctcgatctcgctgtcctcggtgatctcgggcatgacctccacggcggcgaacgacgtgtgccggcggccggaggcgtcaaacgggctgatgcgcacgaggcggtggatgccgttttcgctcttgaggaagccgtaggcgttctcgccttcgatcatgatcgtcgcgctcttgatgccggcctcgtcgccgtcgagatagtccatgagcttgacggtgtagccgtggcgctcggcccacatgttgtacatgcggtagagcatgctcgtccagtcctgcgcctcggtgccgcccgcgccggcgtggaaggtgaggatggcgttgttcgcgtcatactcgccggtcagcagcgtctcgagccgcatggattcgagcgtctcctcgaagctgtgaaattcgctctcaaggtcgggcagcatcgagtcgtcgtcctcttcgatggccatctcgcacatggtcagcatatcctcccacgcgccggagagcttggcgtagcgatcgagcttgtgctggagcgtcttgatgcgcttttgcacgcgctggctgttttcggtgtcgttccagaagccgtcctgcgcgctctcttcctcgagcttttcgacctcgttgcgcgcctcgtcgagatgcagcgcgccgcccagatcgtccagcgccgggcggaggttgttgagcttgtttttatactcttcaaatgcaatggatgccatacgttgaatcctgccttttttcagtctaacttacttattataatcaaaatcgccgcgcttgtaaagcaaaaccgcgctcattcggcctcagccttcggctggatggactcgtcgttgacgatccagttctgcacgtcgatgatctcaatgccgtcgtcgccgatgcggttgacgacgcgcgtgatgccggagttgatgatcatgcgccggcacatggcgcacgaggtcgtgtcgtgcagcagctcgccgctggcggcgtcgcgcccgacgaggtagagcgtgccgccgatcatgtcgcgccgggcggcggagatgatggcgttggcctcagcgtgcacgctgcggcacagctcgtaccgctggccgctgggaatgcgcagctgctcgcggttgcagtagccgagctcggagcagttgacgcgcccgcgcggcgcgccgttgtagccggtggagaggatctcgtcgttcttgacgatgatcgcgccgtatttgcgccgcaggcaggtcgagcggtcgagcaccgcgtcggcgatgttgagataatatttgtccttactcatgcgctggtccatgacggacgcgcctcctttgcataatttcctactttatatcatatcggaaatgccccgccgcgtcaaggcccgcactggtattctgcgcgcgggtgtgctatactgtccggcaggtgacgcttatgaaagaaaactatcaaaaacagctcgatgcgctgctcgctgccctcccgccggagggcaagccgcgcctgctgctgcagagctgctgcggcccgtgcagcagctacgtgctcgagtacctcacgcggtattttcgcgtgaccgtgctgtattataacccgaacatccagccgcgggacgaatatgaccgccgcctctactggcagcgggagctcatccgtcagctcccgacgccggagccggtggacctgctcgcgtgcgattatgacgggcagcgctacatcgacgccgtccgcggcctcgagcgcgagccggagggcggcgcgcgctgcacggtgtgcttccgcctgcgtctggaggagacggcgcggcaggcgcgcgcgcacgggttcgactttttcggcacgacgctcaccgtctcgccgcacaaggacgcgcagcggctcaacgccatcggcgcggagctggcgcagcaatacggcgtgcgctggctgccgtcggacttcaaaaagcgcgagggctataagcgcagcatcgagctgtccaaacagtacggcctctaccggcaggaatactgcggctgtctgtacagcaaaccggttgacaacgcggcggcgggggagtaaaatagccgccgtcacaattcatcatgcgcaggtgccatacccctgcgcgcacaacgtgtgcaacgaaaaaaatgggaggaattgaattatgcacatcaccacgagaaagctgaccgccgcggcggtcacgggcgcggcctatgccgcattgacgatgcttctggcgccgatcagttacggagcgatccagtgccgggtctcggaggtgctgtgcattttgccgtttttcatcccctgcacggcgtgggggctgttcgtcggctgcgcgatcgccaatctgctgagcgcggcgggcatttttgacgtggttttcggctcgctcgcaacgctgctggcggcgctgtgcacggcgtggctcggccgcggccgcggtgcgcagtcgtgggtgcggtgcatcctcgccgcgctcatgccggtcgtgttcaatttcctgctggtcggcgcggtgctcacgtggtcgctcacggacgccgtgtttccgcacctgaatgcatcgttctgggtcttcggcggccaggtcgcgctcggtgaggtcatcgtgctcggcgtgctgggcctgccgctcatgcgcctgctgccgcgcaatccgaagttccgcgagatcatccgcagctatcaaaaggagtgacggagcatggaccgttccagcggtatcctgctgccggtgtcggccctgccggggccgtgcggcatcggcgacctgggtgcagacgcccgggattttatcgactttctcgctgccgccgggcagcgctattggcagatcctgcccctcaacccgccggacggtgcgcactcgccgtacctgtcggcctcgacgtttgccggcagcaccgacctgctctcgccagagccgtttctggcgcgcggcgcgctcacggccggcgaggtgcgcgccatcgactggggcgcagaccccatgcgcgtggactatgatcgcgtgtacgcgggcaggaccgcgctctgggacgcggcgttcgcgcgcgaaaaggcatccgccgcgcccgcgctgcgcgccgcgctcgcggctgagccgtggctgcgcgactactgcctgtacatggccgtgaaggaagagcagggcggcgcgccgtggtatgcctggccgcagcccctgcgcgaccgctcatccgccgcgctcgcggccgcgctcgagcggctcgacgaccgcgtgctcctgcacgcttatctccagacggagttcacccgccagtgggacgcggtgcgcgcctacgcgcacgcgcacggcgtgcgcatcatcggcgacctgcccatgtacgtcgcgcccgacagcgcggacgtctgggcgcagccggcgcagtttcgcctcgaccccgacgggcagccgagcgccgtcgccggtgtcccgccggactatttcagcgccgacggccagctctggggcaacccgctctatgattgggatgccatgcgtgcggacggcttccagtggtggaaagaccgcattcgcggcgctgcaaagcgctatgatgtggtgcgccttgaccattttcgcgccatttcaagctattgggtggtgccacgtggcgaactgaccgcccgcggcggccactgggcgcctggccccggcccggcgctgctgcaggcgctgcacacggcagcgccggaactggagctgatcgccgaggatctcggcacgatcgacgacgacgtgcgccgcctcgtcgcgcgctccggctgccccggcatgcgcgtgctgctgttcggctttgaccccagcggcacgtccgagcaccggcccgaccgcgtgcgcgcgcacagcgtctgttacgtcggcacgcacgacaatgcgcccgccgccgcatgggcggcgctcggcggcgcggacgcggactatgccatgcgctgcctcggcgtgtacgacgttgcgcgcctgccggaggcgctgctgcgtgccggcatgggctcgcgcgcggagctgttcatcgcgcagatgcaggacgtgctcggcctcggcgcggagagccgcatgaacacgcccggcacggcctccggcaactgggtctggcggctgctgcccggtcaggcggacgcgcagacggccgcgcgcctgctcgcgcgcacgcaggcggcctgccgcgcataagaacgaaaaaggagcggacaccgtgatcggtgtccgctccttttctatggatctcagatgattgcgcgcacctgctcgatgagcgcgccgtaaaacagccggtatccttcctccgacaggtggatgccgtcgtccgcgttgagcgcgtgggggtcgcccccgtcgagaaagcgctcgcgcgggtcggcgcacggcacgtccagctcggcggcgatggtgcgcacgagcccggaatagcgctcctgcgtgcggtagatgcgccgcacgtcgcccagccactgcatcacgcccgcggcgctcgcgccgttgtggtcgatgcaggcgaggtacttcacctcgtcgatgggcggcagggtcgtgaagatcgggcggatgccggcctcgcgcagcatctgcacgatggcggtcatgttcgcgcgaaattcgtccgccagcaccacggggtcgtggtcctgctccgggtgcgcggccacgtcgggccagtcatagttgcagtcgttgccgccgtattccacgagcgcccagtcatagcggtggccgcgggcgaggtcgcgttgcacgagcgtgacgcccttgcgcgaggtcgcgccgaagacggacttgttcgtcacctcggcgtgcagaccggcgagtggtgcctcgaacaggtcggtgtgaaaatgataccgcagctgctcgtccggcagcgtgcccttcatcagcgagtcgccgaatacggcgatgcgcagcatctcgtccatcgcgggtgcctcctgaaactttggttacttcatcataccgggagacacttaaaaaaccattagaaatttgtaaagaaatcgcggcgatcggacagatcgccgcgattggcagtttcggcagatttacttccacagcgccgggggatacgtcccgtcggcgtgcagggcgcgcagcgccgcgacgacgccgggcttgtcgtcctgatacgtcaggccgaaccagcgctcgttggtctgcagcacgcgcgtgtttacgcgcccctgcgccgtgagcgcgtccatcatcacgggcagcaggcactcgcgcttctcgtcaccgggggtgagatcgcgcacaaaggcgtcaaaatactgcgccatcacgtccaacatcgccgggtgatagccccacatgttcatgctcacgagcgcctcggggtcgagcacgatgccctcgccctcaccggacgtgtcgcggatcgtgccgtccgggcagagctggatcttatatgtctcatgcaccttgcgcagcaggccgttttcggtcgcgcacacgccgcgcgtgaccgtgccgaaggggctcacggtgtttttcagccggtagccgaccatggcggcgtcctgcgcgccgcgcagctccggcagcgcggcggcaatggcgtcgatcgcgccgcggccgtaaaaatcatcggcgttgatgacggcaaacggcgtttcgatcacatcgcgcgcgcacagcacggcgtgcaccgtgccgagcggcttctgccgctgcgccagctccggccgcgccgcggtgaagcgctccggcgtctgaaacgcatagtcgatccggacgccggtgcgctgctcgatgcggtcgccgaagagggcgcgcacatcctgcagcatctgcggcttgatgatgagcacgatgcggtcaaacccggcgcgcagggcgtcgtagatcgcgtattccatgaggatctcgccgtcggggccgagacgctcgatctgcttgacgccgccatagcgcgagccgagcccggccgccatcactaccagagtcatatccatgtatgcaacctcattttgtcatagagtattacacagcatagcacaacccggcgggaaatgtcaaactttgctgattgccttaaatttctgccgctgacattctatgcccttgcaaaagcgggaagggtggggtacaatcagcttcgacaaaggttgtcataattcccaagaaggagggcggacgcgcacgcggcgcgtccggagaagcgatgaaacgaatcctatctatctttctctcgctggtgctgacggcagcgctgctgagcccggcggctgcggcggcgaacgagacggacggcaatgacaccgactggctgtacatcacgctcgaccccggccacggcggcaacggcgcgggcggcaacgatcccggcgcgatcagcagcacctatggttatcacgaggcggaccttgtgctcaagatcggcctgtacttaaagcaggagctcgagacgtaccgcaatgtccatgtggacatgacgcgctcggacagctacggcacgagcgccaccgcgccgctgagcaaggtggaaaaccgcgtgctctttgcagcaggtcagcactccgatctgctcgtgagcctgcatctgaattcctcgcccagccagtcggcgcgcggcgctgaggtgctcgtcagtaacggcaactaccggcccgagatcgccaaagtgctcgacggtgtcggcacgaacatcctcatgcagctcaaaaatctcggcatttataatcgcggcctggtcaaaaagagctcgcaggacaacacgctctatcccaacggcaagctcgccgattactacggcatcgtccgctacggtgtggagaacaatgtcccgtccatgatcgtggagcactgttttatcagcagcaacagcgagtgtgagcagttcctgtcgagtgacgccaagctgcaggccatcgcgcaggcggacgcgcgcggcatcgcggcctattatggtcttcagaagaaagcccccggcgaggtcgatgtcgagccgacgttctatgactgccgccatcactgggccaagacgtccattgaggccgcggcgagcgccggctgggtcaacggcgtgagcgcaggggagttccagccgaacggcacgctcacgcgcgccgcgtttgtgacgatgctcggccgcatggcgggcgtcaaggatacggactacaccaccagcgtgtttcgggacgtcccggacggggagtggtacacgtcgtttgtggcctgggccacggaaaacgggatcgtggacggctacggcgacgggatattcctcccgcaaaacaacatcacccgtcaggaaatggcgaagatcatggcaaaatacctggcctggaagggactggacaccacgccgtcgtccgagatctcgtcgtatccgatcaacgacctgaacgccatcggcggttgggcgatcgagccggtctgcttctgctatgagcagggcctgctcaacggccgcggttccaattttgccccgcaggccaacgccacgcgcgccgaggcgtgtgtggtgctctgccgccttcaggagtatgtggacgcacagtctgcgcagccggccgcagcagagccggcagcgcttgccggttgacttcctgcactttcagggtataataaggttaacatactgttgaaatggaggaatccaccacaatgagtgacaatcacaacgaagcacccgaaaactgcacgcacgactgttcgacctgcggcgaggcctgtgcccagcacgagccggagtccctgcagcagccgctgcgtcccggttcccgcgtcgataaggtcatcgcggtcgtgtccggcaagggcggcgtcggcaagagcctcgtgacgagcctgctcgcctgcgagatgcagcgccgcggccatcaggccgctgtgctcgatgccgacatcaccggcccgtcgatcccgcaggctttcggcgtccacggcggcgccatgggcggcgaggacttcctgtatgccaaccgtacccgcaccggcatcgagatcatgtccatcaacctcctgcttccgaacgagaccgaccccgtcgtctggcgcggcccggtcattgccggcgccgtgacccagttctggaccgacgtgcagtgggacaacgtgaactatatgttcgtcgacatgcctcccggaacgggcgatgtgccgctgacggtgttccagtccctgcccgtggcgggcgtggtcgtcgtcacgtccccgcaggagctcgtcggcatgatcgtcgacaaggccgtcaacatggccgacatgatgcacgtgcccgtgctcggcatcgtcgagaacatggcctactacacctgcccggactgcggcaagcagcacgccatcttcggcgagagccacattgaggccattgccgccaagcacggcatccccaacacggccaagctgcccatcgaccccgccatcgcggcggcgtgcgacgcgggccggatcgaggacgtgcagggcgactggctcagcagcctcgccgatgccatcgagggcaagtaattgtctgcataacaaaaaccgctctgcattttgcagagcggtttttctgcgcagccccaaagcctcgcagagtttcgccgccggagcggcgaaagaaagtccgatcattttctccggcgacatgtgcgtcggagaaaatactgctcaggctgcaagtgtggaatttgtgcgccgccggcggacaaattatgcgcgcagcaggctgcaggccttttgtcggaaaacccggaggttttccgacagactcaaaaaccgctctgccgtcggcagagcggtttttgactttaccatttgttgatgaccttctcggcgaagccggggaggtctttcacgttcagcaccgtgccgtcgtcgagcacggcgcggccgttgaacacgccgaacacctggtgctggtcggacttgatgaggcccacgtccgaacaactcgcgcggtcgagcacgggggtgtagtccatctcgaagcggccgtcgtcgctcgtgaaggtccagggccgcatatagtccggcgtggccctgccgccgtcgccggggatgtggaagatgacctggctgagcttgtgcgcccggcccttgtaaaagagcatgttctcgctcgcggcgctcgtgttgccgaagccgtagccgatgttgaagccgaaccgctccccgtccacgagaccggaggcgctgccccagtaccacgtgtttttatacgtccacacgccgcggccccagtcgagcacggcgaagctgtccgccgggtcaaaggtgtacgtgcggttgtggtagccgtaggtcacagtaccctcggcgcgcatgcagttgatcttctggttgtagtaaaagtgcttgtccttgtcaaagggagtggcgatgaccatggactcggccgggatgtccgtgagcgtcaccttcgcgtacagcgagccctccgggccgaagtttttcatctgcgcgatgagcacgcggcggtctccctcattcttgaagaggatgctgtagttgcgcccggcgctgtgcacatcgccgcgttcactgctctcgggcaggcagaccttgccgttcgtgaaagccttcatcgggcttttcgtgatctcccacccttcgtcgaggttgagcagggagatggagtcgagccccatgtagctgttgtccgcgatggtcagggcgagggcgaagtggccgttgttgatgcagtagtagtcccattccttgatgcgcagcttgttggccttgatgtcgccccggcggtagacgggcagcagggacttcgcatagccgggttccgtcaggttgccgctcgcgtcgagcagggggcggcgctcggtgatctcgtgctgattcatgcttcgcgctcctttttgatctgccggatgtcccgccccacgaacgggagcgtctggtattcgccctcgatgcgcgacaggatctgcggcgtgtattttttctgcagctcctcgttggagcagttcgtgctgatgatggtggccttggcgcgcgtcaggcgcgtgttgatgagcgtgtagagcgcgctcgtggagtaggccgtgatcatctcggtgccgagatcgtcgaggatcatcagatcacagccgagatactgttccacgcgctgcgcggcggcctcgccgtcggcgctgccgcgctggaactttgcgcactcgaacgcatcgaatgcgctcgcggccgtctcataggcgacggcgtagcccgcgcccgcgacgacgcgcgcgatgcacgccgacagatacgtcttgcccagccccgtgccgccctgcagcagcaggttcatcgtgccggggcggaacgtctgcgcaaacgagcggcagacctgaaacacgcgctccatcttcggccgcgcgttctcgtcgtagagcgtcaggtcgaagtgctcgaacgactcgtcgccgtgctgcagcaggcggctgaggtcgcgcgtgagctcggcgttgtagcgccgcagcaggcactcgcacggctgctcctgcacatagcccgtgtcgtggcagcgggggcaggtgtaaatgtcgtcggtataatccaccggcaggtggtacgccgtcagcagttcggcgcgctgcgcctgcgtgtcgagattcgcgcgctcgagcgcgcgcagctcctccgtcgggtcgctgccgtggcgcatcgtcaggccgacgagcgcgatcatctgctgctgcagcgtctgatcgagcgcgcgcaggccgggcacgcggcggtaggcgtcgtccatgcggcggcggtgctcgcgctcattttccgcgcgctgctgcgcgatctgctcgcgggcgcgcgccagatagatcccattgcgggccatgccggtccctccttaggtgttggtctgctccatcttgcggagcagctgctccacgcggtcgagatcgtcgcgctcggccgccggcgcagccggattggccgcgcggcgcttgcccgctgcgcgcgggtcgccggtctcgatctcctcgggcgtgtgcagccctttttcgtgccagctcatgaggatgcggttgaggtacgcccacttgcgcgccccggtcgccacgaccgtgcggtcgtatgcctcggcgatggcgtcgcagccgaagcccatgtccagccagctcgtgatgtagccgcgctcggtgcggctcggcgcgcggtcctggatctgcagcacctgcagcacctgctgcgccagctcccgccgcgcctgtctgcgttgtaaatattcctccgcctgcgccgtcgtgtggatctcctgatcggcccacgcataggcctccttttcgatccggcgcatcgtcggcgtgccggcgtggccgcgctcggcgcggtattcctgaaacacgtagtggatcagctccatgagcacgtcggccgggagacccagatagtcccgcaggcctaggagcatattcatctcgggcgtcgtgagcttgcggccgtagagctgctcggcctcgcggcgcacggtctgcatcggctcgtcgctgagcatccggctggcaatgtcctcggccgtgtactgcggcagctcggccgccggcacgagcttcggctcggccgcgcccggcttgtctgccgcgggtgctgtacggccggccggggcaggggacgacttcccggcggcggagacgagcccgagcgcgcacagccgctccatcgtctggcgcagttcgcgctcggtcaggccgatgctttcggcgggaaacggctttccgccggcgcgcagcagcgccagatataccagggcgcagcgcccgtctttttcccgcagcagcttgtccacttcctcgaccggcagcgacagacacaccggccgcgacagcgtaaattcggctcgatccatgcaattacccctcgggtcactagaaattcatgataggttcacattatagcatgaaaattgacttgtagcaagagcacctgctgtgctataatgctatatgtatgactataactgggagtgggtctatgctggaattgctggcgcccgcgggcaacctcgacgccgtcatcgcggcggtgcaaaacggggcggacgcggtgtatatgggctttggcgacggattcaacgcgcgccggagcgccgataatttcacacgggagtcgtttgccaaggccgtgcgctactgtcacatccgcggctgcaaggtctacgtcacgctcaacaccctcgtgggcgaccgcgagatggacgccgccgccgcgctcgcgcagcaggcgtcggacgccggggcggacgcgatccttgtgcaggatctgggcctcgcgcgcgtgctgcgcgccgccctgccggacattccgctgcacgccagcacgcagatgagcatccacaatctcgccggggtcgaggccgcggccgagatgggcatcacccgcgccgtgctcgcgcgcgagctctcgctcgagcagatccgcttcatctcgcagcacgtgagcatcgagaccgaggtgttcgtgcacggggcgctgtgcttctgttattccggccagtgctatatgagcgcgctcatcggccgccgcagcggcaaccgcggcgcgtgcgcgcagccgtgccgcatgcagtacagcatgggcggccgcatggatgagtatccgctgagcctgcgcgacaactgtctggctgactatctgcagcagctcgaggacgcgggcgttgcctgcgtgaagatcgagggccgcatgaagcggccggagtacgtcgccgtggtcacggacgtgtatgcccgctgcatccatgagcaccgcgtgcccacgcaggaggaaaacgaccggctcgcgctggcgttctcgcgtcagggcttcacgcagggctacctgctcggggaaaaagggccggacatgctcggcacacgcgccgctgagcccgaccgcgaggcggaaaaaatgttcaccgccgcgcgcaaggcgtatgccgacggcgagcgccgccgcgtgcccgtgaagttttatgccaaggtgcagaccggcgagccggtcatggccgccgtcatggacgaggaaggccaccgcgccgtgctcaccggccccgtgccggagcccgcgcagcgcgcgccgctgaccgcgcagagcctcgccgaccagtttgccaaaacgggcggcacgccctattattccaccggcaccgagagccgcatcgacccggatctctatcttccggcggccgccgtcaacgacctgcgccgccggctcatcaccggcctgaaggaggagcgcgcggccctgcccgagcggcggagcctgccgctgccgctgcgtccggagggcaagcgctattttgccgaccccgcgctcatcgtgcaggtgcatcaggccgagcagctcacgcaggagcttgccgcgctgcacccggcgtatgtatatgtgccggtcgagatcctcgacagtgattttccgcgtctcgccccgtttctggagcagggggcgcaggtcgtggcggtgctgccgcgcgtcatcacggacgatcaggccgaggacatgcacgccatgctctctcgcgccgccgaaaacggcgtgcaggaagcgctcgtcggcaacatgggccatatcttcttcgcccgccgcgcggggatgcgcgtgcgcggcgactttggactcaatgtctttaactccttcacggaggaagtgctgcagcaggccggtctcgtgagcgcgacggcgtcgttcgagctgcgcgtggcgcagatccgcgaccttgccaaaagcatcgacacggagatgatcgtctacggccgcctgccgtgcatgatcaccgagcagtgcatcatccgcaacagcgcgggccgctgcaactgcagcgtgcccaacaatctggccgaccggcgcggggcgctgttcccggtgctgccggcgttcggtcaccgcaaccagatcttcaacgcgcacaagctctacctcgccgacaagcatgaggactatgaaacggcgggcctctggggcgtgcgcctcatgttcacgaccgagacgccgcgtgagtgcgtcgcggtcacgcagagctatctgggcctgacggattatcgcccgaacgggctgacccgcggcctgtattatcggggcgtggaatgacccgcccgggaggaacgaccatgaactggattctagcctccggctccccgcgccggcgggagctgctggagatgctcggcgtgccggacctgacgatccggccggcaaagggacctgagcgcgcgacgccgggcgccggcccggagcagaccgtgcgcgagctggcgctgcacaaggcgcaggaggtcgcacagacctgcgcgccggaggacatcattatcgcggcggacacgatcgtctatctcgacggcgccatcctcggcaagccgcgagatcatgacgacgccgtgcgcatgctcacggccctgtccgggcgcgagcacatcgtctacaccggcgtcgccgtgctgcgcggcggcgagctgcggcaggcggccgagcgcacggccgtgcgctttcgccctctcacgtccggggagatcgagcgctacatcgccaccggcgagccgatggacaaggccggcgcttacggcattcagggccgcggcgcgctgttcatcgcgcatctggacggcgattatttcaacgtgatgggcctgccgctgtgcaggctgggacaactgctgaacgaactgggagtcgagctgctttgaactggaaaacgtatctgaaaaagaaaggcgcgcgcgtcggcgcgatcgtggtcgcggtcgtgctcgtgctcgcgctgatcgccggggcgctcggcggcaaggcgggattcctcacgaatctcgacggcatcgtgcgcgcgccgctgcagaaggccgcgaccgtcacggcgcagtggctcgagagcatctacggctacatttataaatatgaccagctccgggccgaaaacgagcagctacgcacgcagctggccgaggctcaggcgcaggcgcgtgaagggcaggaggcgatcgcggaaaacgagcgctatcgtgacctgctgggcttcacgcagcggcacacggacttcgagctcgagcccgcgaacgtcgtgtcctacggcgcgtcgaactggtcgagcacgctcacgctcagcaagggcagcgacagcggcatcgaggtcggcgactgcgtcatgaacgagtccggcgcgctcgtcggtcaggtcatcgagaccggcagcacctgggcgaccgtgcgcacggtcatcgacgtggatatgagcgtcggcggctatgtcagcggcagcggcgcgacggccatggtcctcggcgacttcacgctcatgcagcagggctgcgcccgcttcggctatctggccgagggcatgagcatcttcaccggcgacaccgtgctcacgtccggcaagggaggcgcgttcccggcgggcctcgttgtcggcacgatcacggacgtgcgcaccgaggccggcggccagcagacctacggcgtcatcacgcctgcgtgtgacctcggcgagctgctgcaggtgttcgtcatcaaagactttgacgtggtgagctgacatgtgggccgatctcatcaacaaggataaggtacaccgcgtgctctggtgcgcgctgtacatggccgtgacgctcctgctgcagaacacggtctttgcgcacattgcgctcttcggcgtgcacgccatgttcgtgccggcagtcgttgtggcggtcggcgtgttcgagggcggcacgtggggcgcggtgttcggcctcatcgcgggctattttggcgccatgggctaccccggcacggggatgctcttcgccgtgctcttcgcggtcatcggcttcggcgccggtatgctcgcgcagtatctcatcaacaacagcctgctgccgtttctcgtgacgtgcctggctgcgtttctgctcacggccttttgccagatgttccgcctgtggatcttccacggcgcgtcgttctggcggctgctggccgtggcgctggggcagagcgtgttttcgctgccgctcgccatcccgtattactatatcagccgtgcgtttcaccgccggcgtgccctgcgctgagcctgccagcgcgcccgacccccgaaaggatcttcgccatggaaaaacccatcaaacccggccgcgtcaccgcgctcgcgtgcatccttatgctgctcgtgatcgtgttcgtcgtcgcgctctataagctgcagatcgtcgacggcaaggcgtattatgaggaaaaccgcaacagcgtcgccagctcccagaccgtggaggccgcgcgcggcagcatcctcgaccgctacggccacgtgctcgtgtcgaacacgagctgcaataacctcgtcttcaatcccgacgacctcttcgagcaggacgatccgaacggcatcctcctgcagatggcgcgcaccgtcgccgcctgcggcgacacgtatgtcgacgagctgccgatcacggccgagcccccgttcgagtacacggacatgaacgacacgcagcgcacccagctcaagggcttcctcaaatacgccggcctcgacgaggaggccacggccgtggagctcatgagctactgccgcgaaaagtttgagatcaacaacaactattccgcggccgatatgcgcatcatcgccggcctgcgctactcgatcaagacgcgctatatcgacaagctctacctgccggactatgtcttcgttcagggcgcgagcatggagctcatcacgtcgctgaaggaaaataacgtccccggcttcgaggtcacggtgtcctatacgcgccagtaccacacgaatctcgcggcgcacctgctcggctacacgggcaagatgaacgccgaggaatacacgacctataagacccagggctaccccatgagcgcgaccgtcggcaaggacggggccgagctcgcctttgagaaatacctccacggcacgaacggcacggccatcgtgacgaaaaacgcatccggcaccgtcaccggcacgacgtacaccaaagagccggagccgggcgatcaggtcagcctcacgatcgacctcgatctgcaggcggcggccgagcagtcgctgaccagaggcatcgagaacatgaagtccaagtcgacggaaaccagcgatgccgtcggcggcggcgcgctcgtggcggtcgatgtcgccaccggccagccgctggccatcgccaactatccgacgttcgacctgcagacgctctttcagagtcaggagagctacgacgccgtcaaggacgccgagaacgagccgctgttcaaccgtgcgctgctcggccagtattctcccggctcgacgttcaagccctgcacggccatcgccggcctgaccgagggtgtcatcaccaccggcacgcgcatccagtgcaccggcacgttccgcaagtatgaggacaccggctacgcccccaagtgctggatcgcctcgtccggcgcgacgcacggcaatgacaatgtcaccgaggccatccgcgactcgtgcaacatcttcttctacaccgtcggcgacagtctgccgatcgacacgctcgcgcgctatgccgcggccttcggtctcggcgagcacaccggcatcgagctgccggagagcaccggccagatggccacggaggccgtgaagaaaaagctcgagaacacgaactggtacgtcggcgactcgctgcaggcggccatcggccagtcgtacagcctgttcacgccgctgcagttggcggagtactgcgccacgatcgcaaacggcggcacgcgccacagcgcgtccatcctgaagtccgtgcgcagctacgacggcagcgagctcatttacgaaaatcaggccgaggtgctcagcgccgtcgagaccagcgactataactgggccgctgtgcaaaagggcatgtacctcgtcgccaatgaccgcgccggcagcgcgtatgagaccttcggcgactacggcgtgaaggtcgccgccaagaccggcaccgcccagctcggcgacaaccaggtcaacaacgccattttcatctgctacgcaccgtatgacaatcccaaggtcgccgtggcggtcgtcgtggagcacggcagcgccggcgcttccatcgcgtccatcgcgcgcgattttctcgacgcatatttcaccgtcaagaccgtcgacaccgcccccgagagcgagctctcgctgctgcagtgacggcccctgaccagacagagaggagttatccatatgaacattgcactcatcgctgacgacggcaagaaggaactcatggtccagttctgcatcgcatactgcggcattctggccaagcacgacctgagctcgacgtttacgactgggcggctcatctccgaagccaccggcctgaaggtccgcacctacctgcactcggcgcagggctgccagcagctcgacgcgcgcatcagctataacgagatcgacctcgtgctgtttttctgcgacgccgagagcggccattttgacgaggtcaaccgcatggcgcgcctgtgcgaccagcggcagatcccgtttgccagcaacgtggccacggccgaggtgctcattctgggcctgagccgcggcgacctcgactggcgcgacatcgtcaacccgaaaaagaaattgtaagcccgaaaggaatcatcatcaccatggacaagatcaaaccccgcaccctgtccggcttcatggagctgccgccggacaagcaggtgcagatggacaaaatgcgcgccgttctggccgagacctacgcccgctacggcttcaccccgctcgacacgcccgccatcgaggcggccgaggtgctgctggccaagggcggcggcgagacggaaaagcagatctaccgtttcacgaagggcgacagcgacctcgccctgcgttttgacctcacggtgccgctggcgaagtacgtcgcggccaattacggccagctcacgttcccgttccgccgctatcagatcggcaaggtctggcgcggcgagcgcgcgcagcgcggccgcttccgcgagttttatcaggcggatatcgacatcatcggcgacggtgcgctcgatattttgaacgaggccgagatcccggccatcatctacgacacattcacgcgcctgggcctgcaccgctttcgcatccgcgtgaacaaccgcaaggtgctcaacggctttttcgccatcctcggcctgagcgagcaggcgggcgatgtgctgcgcaccatcgacaagctcgacaagatcggcgcggacaaggtgcgcgagctgctcaccgacacctgcggcgtcacgggcgaaaacgcggacgagatcctgcgcttcatcgcctgcccgggcacgagcgcggacaagctcgcctttctcgagcagtaccgcggccggaacgagacattcgataccggcctcgacgagctgcgcaccgtcgtgggctacctgcccgcgttcggcgtcccggaggagaacttcgagctcgacctcacgatcgcgcgcggcctcgattactacaccggcacggtgtacgagaccgttctgctcgaccatcccgaggtcggcagcatctgctccggcgggcgctacgacgacctcgcggggtactatacgaacaagtccctgcccggcgtcggcatctccatcggcctgacgcgcctgttttacatcctgcaggagcagaacatgatctccgacgccgtgctcaccgcgccggcggatgtgctcatcctgccgatgacggacgacctgtccgcggccgtggcgctggcgtccgaactgcgcgccggcggccttcgcgtgcagatctacagcgagaagaagaagttcaaggccaagatcggctatgccgacaagctcggcatcccgtttgtgatcttcctcggtgaggatgaggtcgcgcagcacgtttgcgcgctcaagaacatggccaccggcgtgcaggaggccgtgacgcaggagactgcgctcgagaccatccgcgcggagatcgcccgccgcagcgccggcgcaattttgcgcgagccgtgacccggtaaacccaccgccgccgcaccgccggaggcgatattcgatagaaagaaagggaatcaggagtatgtttcagtcccgcacacacacttgcaacgagctgcggctcgaaaacgccggcgagcaggtccgcatcgtcggctggatggaaaatgtccgcgaggtcgggcagaattttgccttcgtcgtcgtccgcgatttttacggcacgacccaggtcgtcattgagaccgaggacatgatgaaggtcgtcaagtcgctcaacaaggagtccaccatcgccgtggagggcaccgtgcgcgagcgcgcgagcaaaaaccccaagctgcccaccggcgacattgaggtcgtgcccacgaagatcgaggcgctcggccgctgccgctacaacgagctgccgttcgagatcaaccgcagccgcgacgccgacgaggcgctgcgcctgaagtaccgctatctcgacctgcgcaaccccgccgtgaagaaaaacatcatcctccgctgccaggtggtggccgcgctgcgcgccgccatgaccgagcacggcttcctcgagatcacgacgcccatcctcacggcctccagccccgagggcgcgcgcgactatctcgtgcccgcgcgcaagcaccccggcaagttctacgcgctgccgcaggcgccgcagcagttcaagcagctgctcatgacggcgggctttgaccgctatttccagatcgccccgtgcttccgcgacgaggacgcccgcggcgaccgcagccccggcgaattctatcagctcgacatggagatggccttcgccacgcaggacgacgtctttgccgtgctcgaggacgtgctcccgccgatcttcgccaagtacggcaagtatgacattgcgtccgaggcgcccttccgccgcatctcctatcgtgatgcgatggagacctacggctctgataagcccgacctgcgcatcgacctcaccgtgcaggacatgacggcgctcgtcgccggcagcgagtttgcgccctttgccgcgggcaacacggtcaaggccgtcgtcgtgcccgactgcgccatggcgcgcaaggccattgacaagctctgcgccgacgtggaggtacaggccggcagcaagccttactggttcaaggttgacgagcagggcagcttcgccggcggcatcgccaaattcctcacggacaagacggcggagatcaccgcggccctcggcctgaagccgggctgcttcgtcggcgtgacggccggcaaaaagaccgccgcgcagaaggcggcgggcgtgctgcgcacaaagctcggcacggccgtgccgggccacatggacaccgagcggtacgaattttgctggatcgtcgacttcccgatgtacgagatcggcgaggaatccggcgagctggagttctgccacaacccgttctcgatgccgaacggcggcctcgagatcctcgaaaaggccgagcgcggcgaggtcgatccgctcgacatctacgcctaccagtacgacctcgtgtgcaacggcgtcgagctcagctccggcgcggtgcgcaatcacgaccccgagatcatggtcaaggcgttcgagctcgtgcgcctcggcgaggacgatgtcaaggccaagttcccggccatgtacaacgccttctgctacggtgcgcccccgcacgccggcatcgccccgggcgtggaccgcatggtcatgctccttgcgggcgaggactgcatccgcgagatcattccgttcccgatgaacaagaacgcgcaggacgtcatgatgggcgcgcccggcaccgtcgagccgcaccagcttgaggagctgcacatcgccgtcgtcggcgacacggagcccgataccgaagcgtgacccaaaacgatgcgacggtgccccggcgttcggccggggctcgtccgtgaaagaaggcgagcggcttgctgtccaaaatccagtccctcggctgccggggcgtgaccggctacgcggtcagcgtagagtgccacgtgtccaacggcctgccggggtttgatatcgtcggcctgccggatgcggccgtcaaggaggcgcgcgagcgcgtgcgcagtgccatcaagaccaacggcatgaagttcccggtcagccgcctgacggtgaacctcgccccggcggacacgcgcaaggccggcacgctctatgacctgccggtgctgctgggcatcctgtgcgccacgggggagatccgccagccgccggccacggcggcgtttctcggcgaggtcagcctcgcgggagacatccgccccgtcaccggcgcgctcacgatggcgctcgcggccgagcagatcggcctcaaggagctctacgtcccggcgggcaacgcggccgaggccgcttttgccgaccgcgtgaccgtctacccggtcgagaacatcgcccaactcgtgcaccatctgcgcggggacaggcgcatcgcgccaaagacagcgccgcggctcgagaccgagccgcgcttcccggtcgattttgccgaggtcaaggcgcaggagaacgtcaagcgcgcgctcgaggtggccgccgccggcgggcacaacatcctgctcatcggcccgccgggcgcgggcaagtccatgctcgccaagcgcctgccgaccattctgcccgcgatgaaccgcgccgaaatgatcgagaccacgcaggtctattccgtcctcggcctcacgacgccggatgaccccgtcgtgcgtacccggccgtttcgcgcgccgcaccacacggtgtcgaacgtcgccatgtccggcggcggcagcgcgctgcagccgggcgagatgagtctggcggacaacggcgtgctctttctcgacgagctgccggagttttcgcccgccgtgctcgagacgatgcgccagccgctcgaggacggcagcatcaccatctcgcgcgcgaacggctccgtgacgtatccgagccgcttcatgctcgtgtgcgccatgaacccctgcaagtgcggctggtatgggcatccttctggccgctgccgctgctcgccgcgcgacgtgcgccgttaccatgcgcgcgtgtccggcccgctgctcgaccgcatcgacatcattgtcgaggtcccggcgctggagtttgacgagctcaccgagccgtcggccggagagccgtcgcgcgccatccgcgcgcgcgtcaacgccgcccgcgccgtgcagcgcgcccgctacggggacgacaccaccacgacgaacgcccacatgggcccgcgtgcgctcgcggagttctgcgcgctctcgcccgagtgcgagcagctcatgcaccaggcgtttgacagcatggccctcaccgcccgcagctatgaccgcatcctgcgcgtcgcgcgcacgatcgccgatctcgacggggcgcagaccatcggccttgcgcacctggccgaggccatccagtaccgcacgtatgacttttccgtcgccgagccgtgagcccggcccgacagaagggagcttcctcatgtacaacaataactacaactacaaccccaactggtatcagccgcccggcccgcagcccggcaagcatgaggccaccgtcgccatggtgctcggcatcgtctcgtgcgcgctgctcatcttcggctacacggcgctcggctcgatcgtcacgggcatcatcggcctgatctatgcctcccgcgccaagagcctcggcttcaacggcacgccgcgcaccgtcggctatgtctgctcgctcatcgggctcatcctcggcgtgctcgtgtgcctgctgctcgtgtggctcggcgcgtggtcgatcggcatgttcatcacgctcatcgagcgctgcctgtgatatcctgaaagaaaaggaacgaacgatttatgaaggatctgctgctctgtaagcccggggagatcttcctcaaggggctcaacaagcactattttgaagagaggctggtcgcaaacgtcaagcgccggctcaaacccatcggccacttccgcgtgacgtatctgcagtcggcgctgtacatcgaggccgccgacgacgcggctgacctcgacgcggcgtatgacgccgtgcgcaaggtattcggcattgcaacgatcacgcgcgcggccgcctgcgagaaggacaaggacgccatcacggcgcttgccaagtcgtacctgcacgacgcgatgacggcggcgcacagcttcaaggtggagaccaagcgctcggacaagcgctttcccatgacgagcatcgagctgtcgcagtatgtcggcggcgagctcgccgaggcgtttcccaatacggccgtcgacgtgcacgacccggagctgaccgtgcgccttgaggtgcgcgagcaggcggcgtatgtccacgcgcaggccgtcgaggcggcgggcggcatgcccgtcggctgcaacggcgcggccgtgacgctgctgtccggcggcatcgacagccccgtgtcctcgtacatgatcgcaaagcgcggcgtgcgcctcgtccccgtgcactttttctccttcccgtacacgtcggagctcgccaaggagaaggtcctctcgctggccaaagagctcacggcctacaccggccgcatgacgctgcagattgtgcccttcacgcacatccaggaggagatccgccgcgcctgcccggaggaatacttcacgctcatcatgcgccggttcatgatgcgcatcgccgaggacatcgccgcgcacaacgagtgcaaggccatcgtcaccggtgaaaatctcggccaggtcgccagccagaccatggaggccatggcctgcacgcaggacgtgacgcacttgcccgtgctccagccgctcatcggcatggacaagcgcgatatcgtgaagatcgcgcgcgagatcggcacatttgacacatccatcctcccgtatgaggattgctgcacggtcttcaccccgcgccaccccaagacccgcccgaccgtggcggaggtcgcggaggcggagtccgcgctcgacatcgacgcgctcgtgcacgaggcagtggacggaattgaaaggatccggatcgatttatgaatgcagaactcattgccgtcggcaccgaactgctcctcggcgacaccatcaataccgacgcggccgcggtcgcgcgcctgctctcggagctgggcatcaacgtctactggcagaccgtcgtcggcgataaccgcgcgcggctcgagcaggcggtgcagcttgcccgcacgcgcgccgacctcatcatcacgaccggcggcctcggcccgacgtgcgacgacctgaccaaggaggtcgtggccggcgcgttcggtatcccgcttgaactcaacaaggccgaggaggagcgcctgcgcggcctgtaccgcgagcgtcacacctacatgacggaaaatcacctgcagcaggtcatgctgccgcgcggctgcaccgtgctgcaaaacgactggggcacagccccggcctgcgcgtttgaggccgacggctgtctcgtcatcatgctgcccggcccgccgctggagtgtgagccgctgctgcgctaccgcgtgcgcccgctgctcgccgcgcgcggggacggcatcattgtctcgcacagcgtcaagatcttcggcatcggcgagggcacgatggagtaccagctgcgcgatctcatgaacgagatgcaaaatccgacgcttgcgccctatgccaaggagggcgagtgcctcgtgcgcgtcacagccaaggccgccacggaggccgaggccgagaccatgatcgctccgtgcctcgcgcgcgtgcagcgcgagctcggcgcttttgcctacggcgtcgacacgccgaatatcgagacgtgcgcggccgagctcctgctcgcgcagcacaagaccattgccgtggccgacagctgcaccggcggcctgctcggcgacctgctcacgaatgtgccgggtgcgtcggccgtgtttgccggcggcatcatcgcctataacgacgagaccaagacccgcctgctggatgtcgaccccgcgctcatcgcgcgctgcggcgccgtcagccccgaggtcgcggccgcgatggccgagcatgtgcgtgccgctttcggcacggacctcggcctgagcatcacgggccttgccggcccggacggcgacggtgtgcacaccgtcggcacgctcttcgtggccctcgccacgccggacggcacgttccaccgcacgctgcacaaggacaagtgggggcgcgtgcgcatcaagcacgcggcggccaaccacgccttcgacatgctgcggcgctacctcaccggcctgccggtggagatggaggaaaaccgctgacgccatcatctgctttttctgcggccggggcagctgtcccggccgcgttgtgacccatgcatgatttgagaaaccggagaatgcctatgaacattaccgttgccggtgtgggctatgtcggcctggcgcaggcggtgctgctcgcgcagcacaacgccgtcaccgccgtgaccacgacccccgccaaagccgaacagatcaaccgcggcgtctcgccgatcgtcgacgccgagatcacagacttcctgcgcacgaagccgctgacgctcacggcgaccgtggacgccgagcgggcctaccgcacggccgacgtggtcatcatcgccacgccgacggactatgaccccgagcgcaacctcttcaacacctcgaccgtcgaggcggtgctcacgctcgtcggccgggtcaaccccggcgcactcgtggtcatcaagtccacggtgccggtcggctatacggagcgcatcgtgggcaggttttgctgcgcgcggctgctgttctcgccggagtttctgcgcgagggcagggcgctgtatgataacctgcacccgagccgcatcgtggtcggccgcccgcacggcggcacggcgacggaggcggacgcgcgccggttcgcgtctctgctgcagcagggcgcggcggagcgcgacatccccacgctctacccgaacgcaacggaggccgaggccatcaagctctttgccaatacgtatctcgctgtgcgcgtgagctacttcaatgagctcgatacctattgtgagctcaaggggctcgacacgcgccaggtcatcgacggcgtgtgccttgacccgcgcatcggcgcgcactacaataacccctcgtttggctacgggggctactgtctgccgaaggacacgcgccagctcgtggcaaacttcggcgacattcccaaccgcatcatcagcgctgccgtcacggccaatgatgagcgcaaggatcacatcgcccgtcagatcctgcaaagggcggcgggcggcgtcgtcggcgtgtaccgcctgacgatgaaggcggactccgacaatttccgcgagtcgagcatccgcggcgtcatcgagcggctgcgccgcgcgggcgcgagcgtcgtggtctatgagccgacgctcagggccgcctcctttgacggtctgccggtgatcgcgtcgctcgcggaattcaagcgcatgtcggccgtgatcgttgccaaccgcgccgagcccgcgctcgacgacgtaccggagaaggtatacacccgcgacctgtaccgcagagactgaaaaagggaggcacagacgatgaaaggcatcatcctcgccggtggctccggcacgcggctgtacccgctcacgcgggtcacgtccaagcagctgctgcccgtgtacgacaagcccatgatctattacccgctctcgacgctcatgctcgcgggcatccgcgacattctcatcatctcgacgcccgacgataccccgcgtttcgagcgcctgctcggcgacggcagccagttcggcatccgcctgtcctacgcggtgcagccgcacccggacgggctcgcgcaggcgtttctgatcggggcagacttcatcggcggcgacacgtgcgccatgatcctcggcgacaatattttctacggcaaccgctttcgcagcaacctgtgcgaggcggtcgcaaatgccgaggcgggctatgccacgatcttcggctaccacgtcaaagacccggagcgcttcggcgttgtggagtttgaccaggacaagcgcgtgctgtccgtggaggaaaagccggcgcacccgcgctcgaactactgcgtcacgggcctgtatttttacgacaaccgcgtcgtggacatggcacggcaggtgcgcccgtccgcgcgcggcgagctggagatcacggatctcaaccggctctatcttgatgccgaccggctgaaggtgcagctgctcggccgagggtttgcctggctcgataccggcacggtcgagagcctcatggacgcggcggtctttgtccagacagtgcagaaccgccaggacgtgatcatttccgcgccggaagaggtggcctatcacatgggctggctcacgaaggcgcagctgttggccgccgctgcgcgctatgaccactcgccctacggcacgcacctgcgcgcggtcgcggaggacaaacttgtgtttgagagggagctgcatgactagatttgtcacgggcggcgccggcttcatcggcgcaaactacctgttttatctgcgtgagcactatccggacgaccgactcgtgtgcatcgacaagctcacctatgccggcgacctctccacgctcgcgccgctgctcgggcagccgaacttccgctttgccaaggtggacatctgcgaccgggaggcggtctacggcctgtttgaagaagaacatcccgacgtggtcgtgaacttcgcggccgagagccatgtcgaccgctcaatcgccgacccgtcgctgtttctgcagacgaacatcatcggcacgtccgtgctcatggacgcctgccgcaaatacggcaatgtgcgctttcatcaggtctcgaccgacgaggtctacggcgacctgccgcttgaccggccggatctgctgttcaccgagcagacgccgctgcacaccagctcaccctacagcagctccaaggccgcggccgatctgctggcgggggcgtacgggcgcacgtacggcctgccggtcacgatctcgcgctgctcgaataactacgggccgtatcagttcccggaaaagctcatcccgctcatgatcgtaaatgccctcgcggaccggccgctgccggtgtacggccgggggctgaacgtgcgcgactggctgtatgtcggcgaccactgccgggccatcgaccttgtggtcaaccacggccgcatcggcgaggtgtacaacatcggcggccacaacgagatgcgcaacatcgacatcgtgcgcctgatctgccgcaagctcggcaagcccgagcgcctcatcacctacgtcgccgaccggcaggggcacgacctgcgctatgccatcgaccccacgaagatccacacggagctcggctggctgccggagacgcgctttgccgacggcatcggccggacgatcgactggtacctcgccaaccgttcctggtgggaggagatcctcagcggggcttaccgcaccggctatgaacggctgtgcggcggcagccccacgccgtgagcgccaagatctaaaaaccgcaggccccggagcgcgatccggggcctgcggttttctttatgcggtctcgccgttatggttcgctgcccagccacttttccaggcacacgagcgcgacgccgtcgatgccgttgaacgtgcacggcgcgatcccggtctcgcggtagccgaggtaggcgtagagccggcgggcgttggcgtttttcgcgttcgtgtcgatgcgcagctccgggcagccgtgctcccgggcgtattgttcataaaaacgcacgaactgcgtgccgtagccgtgcccggcggccgccgggtcaacgacgagcgtgtgcagcacgagcacctgctccggcgctgcgtcgtgcgcccacggcacctcggcatacactggcacctgttcgctgttgatgcgcccggcggcatagacagtgccgtcgctctccagcacgaacagctcgccggcgtccagcgcggcctgtgcggtcgcgcgcgtcgggtacacgccgcgcacccagccgatgctgacgttcccggcctcctcggccgtgtggatcgcgtcatagatctcttcaatgcgcgcaaggtcgtgcgcagctgcggggcggatgatcgccatgggtactgcctcctgtctcatgtcacaaagatgtcttctgggatcagcgcggcgagcgcctgctgcccggccggggtgtggtgcacgccgtcggtcgtgtaggccgggacgagcgcgtccggatcgttggggtcggccagagcgtcgagtgggatgtacccgtcggcggggcagtccgcgccctgaaaccaggcgttgagctccagccgcagcgcgtcatattccggcgaccactgaatgtcgtccccgcggccgaagaggttgcgcgtgtagcccttccacggcgtgagctcgcaaaaccagatgcgcatgccctgtgcgtgggccatgtcggcaagtgcgcggtagcccgccgtcatctgcgcgaacgtcaccggggtcagcagcccctgcttgctctggcagtgcgggtggatgagatcgttcgcgccgagcttgacgagcaccatgtccgcgcccgcctgcgcgagcacatcgcgcgcgaagcgctttacgcccgcgccgccgagcagctttgccgcgcggcccacgccgtcggccaccagccggtcgcccttgatggcggcctgcgtcacgcttacgttttcaatgccatcggcgcgcaggcgcgcggccagcaggcgcggcagctcgtttgccacggtcgagtcgccgaagatgacgcacgcatgcgtcccggccgcggccagcacgtcgatctccgtgagcgcggggatgacctcatacgcgccggagtccgccgtgtgctgcatcggcacggccatgtgcagcagagtgcggcgcgtgcagttgccgagctcggcatggctgcatccgccgatgagtccaatcgtgcgcatggcgttgatgccgcggtaaaagaccgtcacggccagcgtctgcccggcggcgaccggcagcgcggccgcgtcggacgtgcagctttctcccgcgccgatgcgcacgtgcgtctgcccgccgaaggtcacggtgcgcagcgtggcggggtcaatgccgcgtgcatcgtctgcgccgatggcgatggtacaggccgccacgtgcagcggcagcacgccgaagatgttcgagagcgtcaggcgcacgtgcgtgcccccggccgtgagctgcacggccgtgcgcgcggatacatccgtcacggccacgccgagccggtcgagcacgccggactcggacaggctcgcgtcgatggggctggtgctccacgcgctgacccagcgggcggcagttttggaatcgtccatggcaaaacctccgaaaacgtaaggatatgtagttacaataggatggttttccgtaaaagtcaaccgtgatcgtgctcgcgctggtgaacaagatgctcgcgcaggtcaaggaggacccggcgagcgtgctggcaatctataacaacatccgccgcaacacgacgacgaacatcaacaccgccatgatggtctatctggcgcagcaggcaagcgggatgcacttctcgggcgatatcgtcaacgtgcccggcacgtcggtcatgggcgcgcagaagcacgcagagtatcaggtcgatcccgatgcgctgttggagatggtcctggatattttctacgagccggtggatggttgactgaaaacggttattttttgaaaataacccttgcattttacaccgtttcggtgtaaaattatgctactattagaagctgtaagtttatgaatggaggagttacacaatgaagcgttttgtggccattcttctgatactcgtgcttgtgtttgcactgtcggcgacggcgtttgctgccagcaatgttaccagcccggagaagggcaacacgaatccgaatgtcaatcccgattccggcaagacctctccgcagaccggtgaatccttcagcatcctgtgggtaatcctggcggccgttgctgcggtcggagcggtgctgttttgcggcaaaaagctggttcgcgccaagtaagatggcataactatgataacaaagctccatgattcgttcat

SEQ ID NO: 13976 - DNA, 53279 bp, Unknown
  gut microbiota DNA sequence
cgtgctggtgcttgtggcgctcgcggcgctgtgcgcgtgcgcgtggtgcgtgtggtacatcattcagtactatcagggccagtccttcggcgaccggatgcgcaccaacgccccggacgacaccggcagcttccagctcgagcgcgtgaagattccggtcgatttcgacgagctgcaggccatgaacccggatatctatgcctgggtcacgatcccggatacggacattagctacgccgtgctccagcgtgaaggggacgaggagtattactccaagcacagcgaaaacggcgcgtactacagcggcggcagcatcttcagtcaggactacaaccagaaggatttcagcgaccccatgaccgtgctctacgggcacaacctgcgcaacggacgcatgtttgcccagctcaacgacttttcggatgccgaggtctttgaggcgcaccgctacatctatgtctatctcccggaccggatgcttgtctatgagatcttcgcggcctatccgcattcgaacgagcacctgctgctgtgtcacgactttgcggatgcggacgatttcacggcgtattttgatgccgagcaggcgcaaaagagcctgcagtccaacttccgcaccgacgcctggcccgaaccgggcgaccgggtgctgacgctctcgacctgcttccgtggggacaatcaccagcgctacctcgtgcagggcaagctcgtggcggaggcccacgccaaataactgcatacgaaaaggaaaacccggcagagcaaatgctctgccgggttttgcgtccggaagatcagccgtgcaggccgttttcctgacgctccatgttttcgatgacgacgtcgtgaatgtcgcccaggcccgcgcagtattcgagcaccttccagggcgtgttcgtgtggaagtggatcttgatgagatcctcgtcgccaacggccagcaggcagtcgcccgcgatattgcgctggatgtagtcgtggatcgcgtcctcgtcgaggccgtggccctcgatgagcagctgggtgtcaaaccggaattcgagcatgctttgcttcctccttattcatcgagcttgagcacggcgagaaatgcctccgtggggatctggaccgtgccgagctggcgcattttcttcttgccttccttttgcttttcgagcagctttttcttgcgcgtgatgtcgccgccgtagcacttggcgagcacgtccttgcgcagggccttgacggtctcgcgcgcgatgatcttgccgccgatcgcggcctgcaccgggatctcgaacagctgccgcgggatgttctccttgagcttttcgcacagcttgcgcgcccggccgtaggccttgtccttgtgggcgatgaagctcagcgcgtcgacctggtcgccgttgagcagcatgtccactttcacgagctcgctcgggtggtagctggaaaattcatagtcgagcgaggcgtaccccttcgtgcgtgccttgagcgtgtcgaagaagttgtagacgatctcgttgagcggcatctcgtagtgcagctccacgagccggctgtcgagatactgcatatttttgtactcgccgcgcagatcctggcacagcggcatgatgttgccgacgaattcctgcggcgtgatgatcgacacgttcacgaacggctcttccgcgacctcgatggacgcggggttcgggtagtcgtgcgggttgtcgatcatgagcaccgtgccgtcggtctttgtgatgcggtagatgacgctcggcagcgtcgtgatgaggtcaaggtcaaactcgcgctcgagccgctcctgaatgatctccatgtgcagcataccgagaaagccgcaccggaagccgaagccgagcgcgaccgacgactccggctcgaacgagagcgaggcgtcgttgagcttgagcttttcgagcgcgtcgcgcagatcggggtacttcgagccgtcctcggtgtaaatgccgcagtagaccatcgaccgcgccgggcggtagccgggcagcggctcagcggcggggcgggccgtttcggtcacggtgtcgcccacgcgcgtgtcctccacgttcttgatgctcgccgtgaagtagcccacgtcgccgcagccgagctcgtcgcacgggtcgagaccgatgggccgcaggtggccgacctccagcaccttgtacgacgcgccggtggacatcatcgtcacctccatgccgcgccggagcgtgccggccacgatgcgcatgagcacgatgacgccgcggtagctgtcatactggctgtcgaatacgagcgcctgcagcggggcgttcgggtcgcccttcggggcggggacgtggtcaacgatgtcgtcgagcacggcctggatgttgatgccctgcttggccgagatctccggcgcgtccatggccgggatgccgatgatgtcctcgatctcggtcttggtgcgctgggggtcggcggccggcaggtcgatcttgttgatgaccggcaggatctcgagatcgtgctcgagcgccaggtaggtgttggcgagcgtctgcgcctccacgccctgcgaggcgtccacgatcagcacggcgccctcgcacgcggcgagcgagcggctgacctcgtagttgaagtccacgtggcccggcgtgtcgatgaggttgagcgtgtaggtcttgccgccgcggtgatacgtcaggccgacggcgcgcgccttgatcgtgatgccgcgctcgcgctcgaggtccatgttgtcgagcagctgcggctccatctcgcgctgatccacggcgccgcacagctcgatgagccggtcggacaacgtggacttgccgtggtcgatgtgtgcgatgatcgaaaaattgcggatgtcttcttgtgggatcatagggcaatctcctccagtgcggcctcggcgcggtcggcggcggtgcgcacgtcctgcacgagcacgcgcagcgcctcgagctgctcgggcgtgcacgtcgggctcggcgcgcggccgagcagaaagtccgcgctcacgccgtagtaatcgcacgcccggcacacgaacgccagccccggctctcgcgcgccgttttcatagtgggacagcagcgcctggctgatcttcagatcggccgcgaccttgcgctgggacagcccgcgcgcgtggcgcagctccgacatgacggcagcaaaattgcgttccatgccgcacctcctgtaacattcatgataacggactgtattttaccacgcccgcgcccaaacggcaacaacctcttgataaaatcgcgcgcaagacttgaaaaacgtcgaatggggtgttacactatttacttgtaaaaccatgttcacagcaagcagaaaatagatgaacatattggaggaaagcaccatgtttgaaaatctggttgaagttctcaaagccaatccgcgcaagatcgtctacaccgagggcaccgacgcccgcatcctcgagtccgctgcccgcctgaagcagggcggcttcctgacgccgatcctcgtcggcaacgttgatgatgtgaaggctgcggccaaggccggcagcttcgacatcgagggtctcgagatcatcgaccccgccaactacgacaagatggacgagatggcccagtgcatgtttgacctgcgcaagggcaagatgaccatggaagaagtccgcgccaacctgcagaagggcaactacttcggcacgatgctcgtgaagatgggcgtggccgacgcgctgctcggcggtgcgacctactccaccgcggacaccgttcgtccggcgctgcagctcatcaagaccaagaagggcgcccacctcgtgagctcctgcttcatcatggtccgcggcgacgagatgctcgccatgggcgactgcgccatcaacatcgactatcaggacaccgtcgacaaggccaccggcgaggtcacgttctctgccgcgcagaagctggccgaggtcgccatcgagaccgccaagaccgccgagaccttcggcatcgacccgaaggttgccatgctgagcttctccaccaagggctccggcaagggcggcacggtcgcgctcagccacgacgccaccgtcatcgccaaggagctcgcgcccgagctgaagctcgacggcgagatgcagttcgacgcggccgtttctccggtcgtcggccagctgaagttccccggctctccggtcgcgggccacgccaacaccttcatcttcccgtgcatcgaagccggcaacatcggctataagatcgcgcagcgcctcggcggcttcgcggcctacggcccgatcctgcagggcctgaacgccccgatcaacgacctgtcccgcggctgcgacgccgaggaagtctaccagatgtccatcatcacggcggctctggcctgatcggtttttcgtccaaaacgtgtttccggcgctgttaacgatgacagcgccggttttttgaaaggggagagcgcctgtggagcgcgaggactatatgcgcgcagcgctcgcgctcgcgcacgccgcggcggccgacggcgaagtgccggtcggctgcgtgatcgccgacggcgcgggccgcatcatcggccgcggccgcaaccgccgtgagcggacgcaccgggccgacgcccacgccgagatggaggccatcgccgaggcatgccgcgcgcgcggcacgtggcggcttgacgcatgcacgctctatgtcacgctcgagccgtgccccatgtgcgccggggcgatcatcaacgcccgcgtgccggtcgtcgtctacggcgcgagggagccaaacttcggctcgtgcggcagcgtgctcaacctctttgaggagcgctacggtcaccatcccgccatctacggcggcgtgctggcagatgactgcgcggatgtcctgcgcgcgttcttcagcggcctgcgcgaaacataaaaagagcgtcccgaatgatcgggacgcatattttttatttctgaatctcttccatcagctcgtggtaaaacacgtcgagtacgccgacatagtgcggtttccacggcttgagccggccgcagtagtggatgatgaccgtgtgcgcgcgcacccagtcgaggtcgaccggggcgtttcgcagctccgcgttgtgcagcgcgaggatgcggtcgctgagattatagaccatgctgtcgagcaggtgcactcggtcgccgtagagcgcggtgagtatgtcctgatccggcagcaggaacacatcctgcttctcgtcggcgaaggcgcgcacacgctccatgtccagatcggcccgcagggcggggaggttatacagcagcacgccggtgttgatgtacggcgcagcctcgtccatgcccagacgcgcggcgttgagcttttcgagcagcttgcgtgtgtgcgtgcaggccatgaagtacgcatcgccgaacggcgtggcatacagcgtcgtcagcgggttgatgatgaccgtgtccgcgtcgagatagaggatgcgctcgagcgtgtccggcagcagcaggggcgccgcgatgcggtaatagatctggcgcgggtagcgcttcgattccggaaagccatcgaacatcgcggggtcgacgaacacaaagtggaaatccacgtccggcagcgctgtgcggatgtctgcctcgtcgccgtccgtgaggtcggagtgcaggatgaacacctcgtagtggctcgcgccgccgtgcagcagcacgctgcgcatgcagcccagaaacgtggggatgtagcccccattgatcgcaaagagcaggttcatgatgatccctcctagatgaaaaacggcacgcgggcgctgcgttggcagcgcccgcgtgtcctgtgcgtccggattacgctttcggcgtgccgtcggggttgaacagcggcagcttgccgagcacggtgatgtcggggcggtcattggcgtcgccttcggcgagcacggccatcttgccgacgatgatgccgccggcctcgttgacgagctcctccatcgcgcgcagcgactcgccggtcgagatcacatcatcgacgatgacgatgcgcttgccgtggatcagctccgcgtccgtctggtcgagcacgagcgtctgcacgccctgcgtcgtgatggacttgacgtgtacctggaacacgctgctcatgtaggctttggcctttttgcgggcgacgaaatatttgtccgcgccgctctggcgggccatttcgtacaccagcgggatggctttcgcttcgggtgcgatcaggtagtcatattcgggcgtcagcttgagaagctcggctgcgcagtgcacggtcagctccacgtcgccgaacatgacgaacgcgccgatgtacaggtcgtccgtgaccttgcacaggggcagatcgcgctttagcccggcgatatccatctcatatgtcatttgaaattcctcctaagtaaaataaacagagtaacaaaagtattatacatgattgccggaaaaatgcaaggcttccggcggtagaaaataccggggcgctcgtgtcatatcggcgggagtatttcgcatacgtttcagtaatagcatccattcggaaacaaaatagcaaaataatgggagttgccattttgctaacgccgtcagattatctaaaaagcggttccctttttgtgcccttatccattgcattggctaaaattgaacagtttgtgaacaaaatcgacgaaaaacagttgcgaattttgcgattttagtgtaaattagcaataacttgatcgtgaatttcccgcttgcggttatggacagcggacgaagcggttatcgtccggcgtcatttgggggggagttccgggaaaagcgaatttgaaattggaggaaaaacaatggacgaaaacaaacgtggttcatttggcagcacaatcggctttctgctctctgccatcggttctgccgtcggcctcggcaacatctggggcttcccgtacaagatgggcagatgcggcggctttaccttcctgatcgtttacctggctctggcggcatttgtcggctttgccatcatgctctctgagctggcgatcggccgcggcaccggcttcggcccggtcaacgcctataagaagatctcgaagaagttcaagtggatcggctggctggccatcatcgccccgttcctgatcatgaccttctactcggtcctcggcggctactgcatctattacatggtcatcaacgtcgtcggcatgttcagcggcatgccggacagcagctccttcggggctctcctcaccaacccgtgggccagcatcggctgcatgattctgttcatgctcatctgctatctcatcaaccgcggcggtgtcggcggcggcattgagaagttcaacacgatcggcatgcccgcactgttcgtcatgctcgtcatcgtcatcatccgtgcctggacgcttccgaatgcggacgtcggcctcaagtatatgttcgtccccggctacgctctgaaggcgggcttctttgacaaggcgcccagctttatggaagttctcgcaacggccggcggccagatgttcttctccctgtctcttgccatgggcgccatgatcacctacggctcctacctcggcaagaatgagaacctcccgaaaaactccgtcatcatcgttatctccgataccctcgttgccatcatggccggtctcgccgttatcccggcggctgtcgccaacggcatcgccaagggcatggccgtctccgatatcaagctcggcggcccgaacctcctgttcgcgactctgcaggacgtgttccatgacatgggcaccatcggcggtattttcggcctgatcttctacgccctcgttctgatcgcggccatctcctccgccatctccctgatcgaggcggtctccgtcaccttcatcgaccacgccagcgccaagggtcacgagcgtgaccgcaacaaggtgctcgccgtcgtctgcctcgccatcaccctgctggcctgcctcgtcgcggttgacggtctcggctccaacggcatcgctccgaaggatctgttccacatcaactccaaggctgactggtgcgctgactggctcgacttcatggatatgctctctgaaggcattgccatgccgctcggcgccctgctcatgtccatcatggtcggctgggagatcaagccgaaatccctgtacggcgagatcgacagcggctacaacggccacatccacggctactacaccttctgcatcaagtatctctgccccgtgatcatgttcttcatcctgcttgtgcagatcagcacgttcttcggtctgggctggttcaactgatcgcagcagcggaaacctttcgtacaacgaaacaaaacaaccgcaaccggcagcctttttggctgccggtttttgttgcgctgtccgccgtgtggcagggatggctacgttgtttctccgggcggggaagaggaaccgccgcttccggccgtttgttctgaccgccgcagcggaagaacggaaaaagcgccgtgcagatggctctgcgcggcgctcttccgctggggaaaatgaagatgggagaaagaaaaaagaggattggtaagtttgcggcggcggggcggttacccgccgccgatggacgatagagaggggatgcacttacttcgtgctgtcgctggcgcggtcgaatgtgacggtcagcgtcagcgtctcgccgttgcgcgagacggtcagcgtggcgctctcgccggcggagtagccgcgcagggcactgcgcagcgcgtcgccggaggagacggccgtgtcgtctatggcggtgatgatatcgcccgccttcaggccggccttctcggcgcagctgccgctgttgacggaattgacatacgcgccgtccggcatgttgtagtactgcgcggcgctcgacgggatggcctgcagcgtgatgccaagctgagcgcggtcagtcacggtgccgtttttcatcaggtcgtttgcgatggccacggcgtcattgaccgggatggcgaagcccagaccctccacgccggaggagctgtatttcgcggtcacgatgccgatgacctgaccggaggtgttgtacaccgggccgccggagttgccggcgttgacggcagcgtcgatctggaacatgttgatgccgctgtcggtgccgtcggaggtggtaatggtgcggtcgagcgcgctgatcatgccgctcgtcatggtgaactccagctcgccgagcgggttgcctacagcatacaccgtgtcgccgacggccatgctgtcgctgtcgccgaaggtgacgggcgtcacgccgctggcgtcgatcttgagcagggcaatgtcgttgtcctcgtccacgccgacgatggtcgcctgataggtcgtgccgtcgtaggtgagcacggacacgctgtagccgtactggtgcgcggtggagatgacgtggtagtttgtgagcacatagccgtcatccgtgatgaaaaagccgctgccgcagctcgcctgggagctcgtctggccgaagtagttggtgtaggtcacttccgtcgtgatggcgacgacctgcttgcatgccagatcatagatcgacgaggcggagctcgggtcggagctgaccggctgcgtcacgagcgtgccgttggagctcgaggcggtgctgccgccggtcctgccggagcgggtgatgagccccgcgatcgcgccgccgccaaggccgccgagcagcgcgcacacgagacacaggcacgcgatgcgcgtgatgagccgcttttgctccggcgtgcgcacggtcttgggctttctcgggtggtgcttgtgcttgggcttctcggcccaggcgtcgtcgttcggcgtgtagtagcgcggcggggtgctgcccgcgtcgtcgctggggtggaagttcgcgtcggcatagctgcgctcggtctcggggcggacgatatggtaggtcacgtcgtcgctgtcgtcgatctttgcgccgcagctcgtgcagaagctcgcgcccggctcgagcgccgcgccgcactgcgggcacacgcggccctgcgcggtggtgttctcggtatccgcctgcgcggaagtgttttcggcttccgactgttcgttttcggggaaattggaagcgtcgttcatgttatctgcctcccggctgtgttgtttttgaagtgtctatatcgtagtcgatatttgtaacacgcgcatgaacaaagggcgaagatttttcgaatattcccaaaagcatttgtgaacactgcgtccgatttgtgaacgcgcggcaaaaaaccgcccgcacatcgtcggatgtgcgggcggtagggctttgcgggtgttaccggccgaagctgctgtcggtcgtttcataggtgttgatggccgactgcgtgtcggcatcgccgccgtacttgatcgagtcaccctcgagcagcggctcgatgccgtgcgcgcgcagccacgcgagcgtgcgcgtggaatcggtcagcggggtgtagtcgacgtcggcgtaggtcgtttcgcctgttgccgggtcgtactggctgagctgataaccgatggtcacggcgtaggccgtgctctgccgcgtgccgctgtcggtcagccaggcgcggcccatggtgccgtccgcgcagtcgggcacgatggcgttttcgtacaggtcgagcgcctgctcggccgtgagttccatgtagaggtagtcgccgctttcggtctcatagccgatgtttgtgtaggtgaggtgctcgagcgtcacggccagctccggcgtgttgcgcgtggtgcgcgcttcgtcgcagttgagcacctgctcgatctgcgccagacgcgtgctcgtgttggggagcgtgtattcgcgcatcagcaccttgccgttcgagagcttgtaggtcagttgcagactggtgatgctggtgtcgtccgtgatcttttcgcgctccgccacgacggcgcggtggatgtcctccacggcctgaatgttctccgcctcggtgagcgcggcgttgtaaccgttgcagatgatgcgcacgcttttgacctgcgcggtatccgggatgcggcgggcgtagcccgtgaggtcgcacttcgcgccgaccacgacgaggcagcacacggccgctgtgaccgcgcagccgcgccagaccgtgcgcgggatgcgcagggacttgcggatgaccatctcgctgatgacaaagccgagcgccgcgccaagaacggtcagcagcagaaacggcgccagttgcgtccggtaggccggcacgttgagcagcatgccgtacacgccgaccggcattgccagaccggcgaagagcgccacgatgtacttcagcaccggcttgagcaccgggatggcgacggtgtcgcccgcgctctccatgcggcggcgccggtagagctgacccgcgcacacgagcagcagcagcgcgaacgccgcccagacgagcggataggtccagccggagaagttggcaatggcgacctccgcccccgtgccgctgatcggacgcaccagatcggcgtgaccgacacttgtgcgccgcatgaacagcaccagcggggagagccagtcgaccggcagatccaccatgcccgacatgccgtacacgaacatgtagagcacggtctcgacgagcagctggaagcccacggcgatgaagttcacgagcaggtacaggcacggcagcatgaccacgtggccggtgaacatggcgcacagcacggcgatgccgtagaatacgaccgtctcgagcgcgagtatgcccagccagatgagcagcggctcgatgacgagttcgaaacgtgtcgcctcgatgagcacggcgagaccgaagaccacggcctcagccgaaagcagcattaaaaggcccgccagcagatgcgtgcggaacatgcatccgcgccggatcggcagggaggcggccagccccgcgccgcgtggcgtgtacagatagccgaacatggcggcggctgcgagcaggcccgcgcaaaacgccgtcagcggcagcagcatctgcgtctcggagagaatgacgttcgagagatagctgatctgctcggtcgacacatacggtatcgtcgagcgcgcgttgagcagcacacccggcagcatgataaacaggatcacgccgtagatgacccacagcggccaccagcgcgacaggcacttgcgaaactccgttccgttacagaaggatgtctttgacggcatagtccgcacctcccagttcataaataaagatctcttcgagcgtcagcggcaccacgtcgaggtactgcggctgcgcggtggacaggcggttcgtgacctcggcggcgtcgccgtgcacgatcagcgtgtacaggtggccctgactgctctggtgcaggatgtcgagcccctcgggcagcttcgcctcgtccggcagggcgacgagcaccttgacgatgttggcctgcaactccgcgagcgggtgctcgagcagaaccttgccgccgttcatgatgcccacgtggtcgcacacgtcctcgagctcgcgcaggttgtgcgacgagatgagcacggtcgtgccgttttcggccacgtcggccagcacgaggttccagacctggcggcgcatgacggggtcgagcccgtcgaccggctcgtcgaggatgagcacgtccggccgcagactcatcgccagccagaacgcggcctgcttctgcatgcccttggataggcggcggatctgccgcttcggatcgaggcggaacacgtcgccgagtttctgatagcgctcggcgtcaaacttcgggtagatgccgcggtagtagcgcatcatgtccgggatcgtcgcctgcgggaaatagaacacgtcgtccgggatgtaggcgatgcgcgccttgacagccgggttttcgtacacgggctggccgtcgatgtcgatcgcgccgctgtccgggcggtagatgcccgtcagatggcggatgagcgtggacttgcccgcaccgttcggcccgacgaggccgtacaccgcgccgcgcggcacggtcatggtcacgccgtcgagcgcgcggaagccgtcaaacgttttgacgacgtctttgacttcaatcatggttcgttcctccttcgggaatgcggcggcgcagctcctcgctgcgcatgccgaggtacagcagctcctgcacggccgcgtcgaactgctgcagcagagcgacctgccgcgcgggatcttccgggatctgggcgcagacgtagctgccgcgtccggcaacggagcagatgtagccctccgtctccagctcgcggtaggcgcgctggatcgtgttcgggttgatggtcagctgcgtggatagctcgcgcaccgagggcagcttttcgcccagcggcagcgagccggacacgatcagccggcgcagcccgtcgcgcacctgttcgtagatcggccgggaatcgcggtaattgatcgagatcgtagtgcaacaccaactttctgtagcgtattaactgcattaaccgtgttggtacagttaagctaccacatgccggcgcatctgtcaaggggtaagatggatttcggcagaaaaagttcccggacggcgttgcgccgtccgggaactgctctatttatttctgcccctcgcggctttcgagatagaccatgagcgtcgcaatgtcggcgggggagacgccggagatgcggctggcctggccgaggctcgcggggcggatgtcgctgagcttctgccgcgcctcgagccgcaggcaggacacctgccggtagtcgagatccggcggcagcagccgctcttcgagccgggtgaactccgccacctgacgcagctggcgctggatgtagcccgcgtacttgagccggatctccgcctgctcggtcacgacgcgcggcagctccggccgcgcggggtcgaacggtgcgaggtcggcatatgtgatctgcggccggcgcaggaggtcggccaggctcacgcccgagctcgtcggcgcggtgccgcgcgcggtgagcatcgcggcgagggcgtccgacggggcgaggtgcgttttctccagccgggcgcactcggcgtccaccagccggtatttttcctgcacggcggcaaagcgcgcgtccgataccagtccgatgcggtggccgatggcgctcaggcgctcgtcggcgttgtcctgccggtgcagcaggcggtactccgagcgggaggtcatgatgcggtacggttcgttcgtgcccttggtcacgaggtcgtccacgagcgtgccgatgtacccgtccgagcggcggaggatcatcggctcacgtcccagcagcttcagcgccgcgttcacgcccgcgacgaagccctgcacggccgcctcctcgtagccggacgaaccgttgaactgccccgcgccgtagaggccgggcactttcttggcctcgagcgtcggcagcagctccgtcgggtctacgcagtcatattcgatcgcgtaggcgcagcgggtcatctccgcgtgctcgagtcccggcagcgtgtgcagcattgcgacctgcacgtcctccggcagggaggaggagaagccctggatgtagagctcttccgtgtccagccccatcggctcgatgaacagctggtgccgcggcttgtcgggaaaggtcatgatcttcgtctcgatggacgggcagtagcgcgggccgacgccctcgatcacgccggagtagatggggctgcggtcgaggttcgcgcggatgatggcgtgcgtgcgctcattggtataggtcaggtagcacacggccttgttctcgaccgggtgcgtggtggaaaacgagaacggctcgatctccgcgtcgcccggctgcagctccatgcgcgagaagtccaccgtgcgcgcgttcacgcgcggcggcgtgccggtcttaaagcggcgcatgcgcagccccagcgccttgcagcactcggccagcgggccggcggccgccagcccgtccggcccggagtcgcgcagcacatcgcccacgatcgtgcgcccgtgcagatacgtgcccgtggcgagcacggcggcgcggcagcggtacacggcaccgtttgccgtcacgacggcgctgacgtggccgtcctccgtctcgacggccacgacctccgcctgcttgacgcgcaggttcggctgcagctcgagcgtgtgcttcatcacggcctgatacttccgccggtcggcctgcgcgcgcagcgagtgcacggccggccctttgccgcggttgagcatccggtactggatgcaggcctgatcggctgcacgcgccatctcgccgccgagcgcatcgagctcgcgcacgaggtggcccttgcccgtgccgccgatggcggggttgcagggcatattgccgatggcgtcaatattgatggtaaagcagacggtgtccagtcccagccgcgcggcggccagcgcggcctcaatgcccgcgtggcccgcgccgacgacggcgacgtcacagcttccggcgtcataacgcatgacgagatccctccggattcttattagaataacaacaaaactttattttacccgtttcgcgccccgaatgcaagagcggcggggtatgcgcgggggcaaaaacggttgtgcagcatccgcacaacaaaattcgaaaaaggtcttgctttatcgtgctaatgtggtaatataacagcgtgctaacaagcaaaacaaaattttgagaatatgacgaaggagaaccgacatgaaaaagatgacgaaagtgatctcactggcgctcgcgctggtgatgtgcctggcgctgtgcgcctgcggcagcaagacggacgacggcaacaccgccgccgacggaaagagaacctttattatgggcgtcgatccggaatacccgccgttcagctatctgggcgacgacggcaagtacaccggctttgacgtggagatcgctcaggccgcctgcgatctgctcggctgggacctgcaggtctttggtgtgaactgggatcagaagctggtgcagctcgatgccaaagagtgcgactgtgtctggtccggcatgaccatcctcgacagcatgaaggatgccggctatgtgctctccaagccctactacgataacacgcaggtcatcatggtcaaggaaggcagcgacatcaagtcctccgcggatctggccggcaagaacgtggccgtgcagctgggcacctccggcgagtccctcctgtccgagggcggcgaccttgagagcctggccaagaccttcggcaagctcacgacctgtgacagcttcctcaagtgcttcaccgagctgggcggcggcgccgtggacgccgtgatcgtcgacaagcccgtggcgacttcttatgcgcaggaaaacgccggcttcaccatcctcgacgaggagctgggcgccgagcagtacggcattgccttccgctccggcgatcaggagctgtgcgacgccatcgagggtgcggtgcagcagctggttgacaacggcacttacgcgaagatcgctgcgaagtatcccgacatcgtcaacaacctgacctacctgaacaagtaagcacgacagaaattccatcacgtctcccggaggcttttgcggccgccgggagcgtgtgcgtaacagtgaggatcctttatgactttacttacgatgatcatgaaaatgagcgagggcctcggcaagacctgcgccattttctttctgacgatcctgttctcgctcccgctgggcatgctcatcacgctgctgcgcatgagcaaaaacaaggtcgtttccagcgtgacccgttttgtgatcgcggttttgcgcggcacgccgctgatgctgcagctactcgccgtgacctacggcccgtactacctctttggtacggccgtcgccaagaacaagctcatccccgtcgtcatcgcctttgccatcaactacgcggcctattttgccgagatctaccgcggcggcatcgagtccatccccgtggggcagtatgaggcggcgaacgtcctcggctacaccagggcgcagaccttcctgcgcatcattctgccgcaggtcgtcaagcgcatcatgcccagcatcaccaacgaggtcgtcacgctcgtcaaggacacgtccatggccttcaccgtctcctatcaggagatgttcaccatcggcaagcagatcgcaaactcccagaccagcttcatgccgttccttgtggcgggcgtgttctacttcgtgttcaatgccatcgtcgattttgtcatgggcaagatcgaaaagcgcatggactactacaaataaggaggtgccgtcatgagcgtattggaactcaatcacgtcaaaaagtcgtttaataacgggacgctgcacgtcctcaaggacatcagcctgagcgtcgaaaagggcgaggtcgtggccatcatcggcccgagcggcagcggcaaatccacgctgctgcgctgcgccacgctgctcgagcgcatcgactccggcgaggtctgctttgacgggcactacgccacacgcacgggcgacgacggcgccgccgtctacgccgacaaggcggagctcaagcagatccgcaactatttcggcctcgtttttcagcagttcaatctcttcccgcactactctgtactcaaaaacgttatggacgcgcccatctgcgtgcagaagcgcgaccgcgcggaggtcgaggcgtccgcgcgcaagacgctcgagaagatgggcctcggcgacaaggccgacgcctatccgtgccagctctccggcggccagcagcagcgcgtggccatcgcccgcgcgctggagatgaaccccgagatcctgtttttcgacgagccgacctccgcgctcgaccccgagctcacgggcgaggtgctcaaggtcatccgcgcgctcgccgaggagcacatgaccatggtcatcgtcacgcacgagatggcctttgcccgcgccgtggctgataaggtcattttcatggacggcggcgtcatcgtcgagcagggcgcgcccgaggcggtcttcggcgatacgcagcaggagcgcacgaagcagttcctcgcgcgctacaatgagcggccgtgacaaaaatgtaagagaaaattcagcttttccctcttgcaccgccgtgcaagattcggtatgataaaaagcgcatcgggttccggtgcgcttttttgatttttcatttgggagggcttcccttgaagcatacaaaacggatcgcggcgctgctgcttgcgctcgcgctgtgtttttcctgcgcagcgtgcagcaagacggtcggcagctaccgcgtggtcaagacgctcggcacggagcagtttcgcatcggctttcgggacggggatcaggcggcggtgtatgtcaatgccgcgctcaaggtcctcgcggccgacgggacgatccacagcctcgcgctcaagtggttcggcacggacaacacgacctttgacagcgatgccaatgcgctcgacgcgctcggcgacattccgcagcgcacgttcatcatgggcctgaacgaggagcgctttcccatgagctacgccgacggcgacggttacagcggctttgacgtcgagctcgcgcaggcggtctgcgcccgccttggctggacgctgcagtatcagccgatctcgaaccagaacgcctatgttgagctctcaagcggtaatgtcgactgtgcctggggcggcatggtgctcgaccagaccgacagcaaggacagcaagaacaagaaaaagcagaagatgacgctcaccgcgccgtatctcgaaaatgagctgcagctcatcgtgcgcggcgactcgaaataccgcacggccggcagcctcaagagcacgaccgtcctgctcggcacggacgagacgtacatgaccgccctctcggccgatgagaagctcatgaaagccttcggcgcggctcagcgcgttaccggcgggtcgaaggcctgcttcgaggcgctctcggccggagactgcgccgccatcgtggccgacagtacggcgctcgcttattatacgcactgaccgtctggccgcccgcgcggggctctgcgcgggcggctttttgtgcggcggggtgcgctttttcgccgcgatccgcaaaaagagctcccgctttcgcgtcaactgtgctatactgactatgtccgcgcctgccagaccggcggaatttttttactcgcgcgggcagaaacacaggtacgcctatgtcgaacagcaacaataaatataaaaccctcgtgtccaacaccatgctcatcagcctcggcaccttcggcagcaagctgctggtgtttttcatggtgcgcttttacacgagctatctcacccccgcggactacggcaccgccgacctcatcacgcagacggccaatctgctcttcccgctcatcagcctcggcatcacggacggcgtgttccgcttcgccgtggatcacaccgagcagcggcgcaacattttctccgtcggcgtgtatacgatcctggcgggcgctgtgctgctcgtggccattttgccgctgctggggctcttcccacagtttgacgggttcctctggctgatcgcgctctatacgatgtgctcgtgcttccactcgctgtgcgcgcagtttgtgcgcgccgagggacacacggcgctctacgccgtgcagggcatgatcaataccgtgctcgtcatcggactgaatgtgctcttcctcgtcggcctgcgcatgggcatcacgggctatgtgctctccgtcgcgctggcggatctggcgtgcacgctgcttttgttcgtgcgcgagcggctctggcgtcagctcatgctctgcccgggctgggcggccgcgcgcgagatgctggcctacagcatccccatgatcccgacgacggtgttctggtggatcacgagcgtgtccgaccgctacatggtcacggcctacctcggcgtggacgccaacggtatttacgccgtgtcgtacaagatgccgacgatcctgtcgctcgtgtcgagcattttcatggaggcgtggcagttttccgccgtgtccgaggcgcagggcagccggcgcgagcacatccgcttcttctcgaaggtctggtgctcgttccagtcggtgatgttcctcgccggcgcgtgcatcatcgccttcgccgttccggagatccacgtgctcacgaccgagcagtattacggcgcgtggctgtatgtgccggtgctcggcatggccatggtcttttccgcgttcgtgagctatctcggcagcgtctacatggtcgaaaagtgcagcaagcgcacgttcgtcacgtccatgatcggcgcgctgctcaatatcgcgctcaacttcctgctcatcccgtcgaagctcggcgtgcagggcgcggccattgccacgtgcgtgagctattttgtcgtgtttgtcatccgggcggtggatgcgcgcaagttcatcccgttccggttttacgttgtcggcgtcacggaaaactgcatcctgctgacggtgcagacgctcttcatcgtcctgcagcttccgggctggaagatcgcgcaggcagtgtgcattttgctgctgctcctgctcaaccgcaagccgcttctggacggcgcgggcaagatcgtccgcttccgccgttgacgcaactttttggaggatttgtgatttgaagatttggaacagcctgtttggaaagatcatcctgaccttcctcatctccatggtgccggtgctcgagctgcgcggcgcgatcccgatcggtgtggcgcacggcctggattaccgcatcgccatcgcggtgtccatcctcggcaacctcgtgccggtgccgttcatcgtgctcttcatccgcaagatttttgcctggctgcgcacgaagagcgagcggctcaacggctttgtcacgcgcatggagcagcgcgcgctcaaaaagtcggacaccgtgcgccgtgcgcgcttctggggcctgttcatttttgtggccattccgctgccgggcaccggcgcgtggacgggctcgctcatcgcggccatgttggagatgcgcgtcaaggaggccttcccgccgattgcgctcggcgtcgtcacggccggcatcatcgttgccgtcgtgacgtatggcgcggcgtcgctgctgttttaattccaacgaggaccgcttcgccgggctttttggcgcacgcaaaaaaatcccgctgtccgatgggacagcgggatttttctgtttttctgtacggcttactcggcaaacgctttttccagcgcctcgagctcctcgcgcagctcgtgcggcagcttgtcgccgaactgctcgaagtattcgcggatgcccgcgcagttttcgcgccagctcttcgcgtcgagcgtcagcagctccttgagcgtctcgatcgtcacgccgctgccgtcgaggtcaatgtcctcgggcttcggctcgtagccgatgaccgtctcgtccgcgcccacctcgtcgaagcagcgcttgaggatccactcgagcacgcgcaggttgtcgccgaagcccggccacaggaagcggccgttgtcatccgtgcggaaccagttgacgttgaagatcttcggtgcgttcggcaacttctcgcccatgtcgagccagtgctgccagtagtcggccatgttgtagccgcagaacgggcgcatggccatcgggtcgcggcgcacgacgccgacagcgccggtcgcggcggccgtcgtctcggacgccatcgttgcgccgacgaacacaccgtgcgcccagtcgcgggactggtagaccagcggggcggtctttgcgcggcggccgccgaagatgatcgcgctgatcggcacgcctgtgcccttgaaaaactcctcgctgatgcacgggcagttctccgccggagcggtgaagcggctgttcgggtgcgcgccgcgcgtgccgtcgctaccgtcccacacttcgcccttccagttgcgcaggtggcccttgggcggccgcttggtcatgccctcccaccagacggtcatgtcgtcctcgttgagcacgacgttcgtgaagatggtgtttttgctcgtggaggcaagcgcgttcgggttagatctctcgctcgtgccgggggcaacgccgaagaagccgttttcagggttcacggcccagaggcggccgtccgggccgacgcgcagccaggcgatgtcgtcgccgacggtccagcacttccagccgtttttgcggtagccctcgggcgggatgagcatggcgaggttcgtcttgccgcacgcagacgggaacgcgcccgtcacatagcgcacttcgcctttggggttctggatgccgaggatgagcatgtgctctgccagccacccctcgcggcggccgagtacggaggcgatgcgcagcgagaagcactttttgccctgcagcacattgccgccgtagttggagttgacggagatgatcttgttctcctccgggaagtggacgatgtagcggttctcgggatcgagcgtgaccttggagtgcacgccgaggatgacgtcgctgctgtcgccgagcgcgtcgagcaccttcgtgccgatgcgcgtcatgatggccatgttcagcacgacgtagatcgagtccgtgacctcgatgccgtacttggcaaacggggagccgatcacgcccatcgagtaggggatgacgtacatcgtgcggccagccatggcgcggcgcaaaatctcgtgcagcttggccttcatctcgtccggatccatccagttgttcgtggggccggcctcttcgcgggttctggagcagataaatgtccggccctcgacacgcgccacgtcgttgacgtcgctgcggttgagatagcagccgggcagcttttcttcattgagtttgatgagctcgccggtttccacggcgattttgcgcagggattcgagctgggcctccgagccgtcgatccagacgatctctttcggggtcgtgagttcggcagtttgccgcaccagctccagtacggacgggttttgcgtcagttccatgttgtcaggttctcctttttgactaaaatttctcgaccttgatccgtatctatactacaattctctgaaaacaccttacaccatcccgccgcgcctgtaaaccccaaaacggaaacttttcctgtgaaccttttcacacaggcgcatttgtgctacaatgcgcgcagacatctctgacccgaggaggggcgtgccatgtggaaaaccattgtgccggcggcggcggtgctggcagccgaggcggtcatccgccggaagatcaacgcgctgccggccgagaccttcccgctgcgcatcgggcagcgcgtgcagctgcgccgggcgcataaccgcggcctgctgtgcagcaagtttgcacgaaagccgcgagcggccgccgcgctgcagactgcgtccgccgcagcgctcgcggcggtggcggccgtgtgcgcctgccgccggggcggcacggcgctgcagatcggcatgggcctgatgctcggcggcgcgctggccaatctcatcgagcgctgggcgcgcgggtcggtcacggactatgtgtacctgccgcgggcggtcatcccgtttttccggcgcatcatctggaatgcggccgacctgagcatcctgaccggctgcaccacggcagtgattgcactgctgtgcgaagaattgtgattatgtgaactgaattatgtaaactgtttggatacaacagcaaatcatttcttacagaaaacgctttgtagtgcacagtgacaggataggtaagttgttgtttcgcaaaggcatttctaatattatgtaaattagaattatgtaaactattaagtaagcgcgaagacaaggacgcctgatcgaaaatgaggctatctattattctgcgctttgcgcagaataatagatagccccttgctccaacctcggaacaaggggctatcctgccgtgttcggttccatcacccgaacctcctttttgtttcgttttcccgccgtgtgcagaggcctttgtgctgcacgcggactccgaccgctgtgaagggaaatgcgtatgcaagattccgcaccactgcgtgccgactccggagtcacagaaccctgtctgcttccggacgattcagtacatcggactcacctccgtcgattccgctgaacctgtattctaaaggcgctgcccctcgtgaggggctgctgctcttccctggttctggctacagtatagcagttcgttttctttttgtcaatgatttaataaacaaaaatcaggcagaatgttcggcaaaaacgccgaattttcctgcctcgcgccaacgccccctgcaacgcggggcgctggcagatcctctgcggcggcgcgcaaaaggaaaaccgccgtgcgtgtccgtcggcgcacagcggcagcagcttcggttcagcggtcgctcggagcggcgctctgaccgccgaagatccagtcgtccaggtcctggcccatgtgttttcacctcccgttgaattcgcatatggccattctatgcgctgcggtgcgaaaaaatgcacgaacccgcgccgtggaaatagaaagaacttgaaaccattggccgattgcgctataatctatgcatattttccgtaatcggagcctgtctccgcgggcaacactatttttaaaggataaggtgaatcacgaatgagtgcatcccaggacaaaaagcgccgcacagacgagcgtgcgctgggtacggagcgccgccaggtcgcctcgcagaaggaagccaaagagcgcaagcaaagcaagatcaagtggacggtcggctcgatcatcgtcgtgctgctcgttgccgccatcctgatcggcaactccagtctcttttacaccgcgcgcccagcgctgcaggtcggcgatgtgaagtattcttcggcggaggtcaattatgcctaccgctccgcctacctcacgttctgcaaccagtacggcagctatctgagctacgttggcctcgacaccagcaaggcgctcgatgagcaggagtgccgcatcagcgatgatttcgacacctgggacgattatttcaaggatgctgccgaaaagaatctggtgcaggtcacggcgctgtgcgatgccgcgcagaaggccggcgtcacgctcgacgaggacgatcagcatgagatcgacgagcagttttcctacctcgagctcactgccaagcagtataagtacaactccgtcagcaagtatctgcaggcggcctatggcaacggcgtgaccaaaaaggtcgtgcgccatatgctcgagcgcagcgagctcgccacgaagtactcgcagcagcagtatgacagctacacctatacgcccgaggagatcgcggccagctacgccgagaataagaacagctgcgatacattcaactatcagtactatttcgtccaggcggataccgaggacagcacggacgacgacggcaacgcgacctccaagaccacggacgccacgatggcggccgccaaggccacggccgacaagatcgccgccgccacgcatgacgcggagagcttcactgccgccgtcacggccaatgttcccgccaagacgtccgaggacggcacgagcaccgcgccgagcgtcacggacaacgccgataccaagggctcgaacttcagctccgccgtgtacgccgactggctctacagcgccgaccgcactgccaacgacgtgaccgtcgtggagcaggaaaacagcggctactatgtcgtgctcttcgagagccgcgatgataatacctacaacaccgtcaacgtccgccacatcctcatcaaggcggaggacagtgacggcgacggcacgtattccgacgaggaaaagcagaaagccaaggccgcgatcgacgatgtttacgcccgctgggagcagagcgaccagaccgaggacgacttcgcgcagctggccaactccttcagccaggacagcggctcgaacacgaagggcggcctgtacgagaacgtctacaagggccagatggtgcaggagttcaacgatttctgcttcgatcccgcgcgcaagccgggcgatgtgggcatcgtctttaacgagagcgattcctactgcggctatcaccttgtgtattacgtcggccagggcgagcgctactgcgactaccttggcgatcaggcgctgcgcacggatgatttcaacgcctgggagggcacgttctttgacggctggaccagcaccgagctcaagggcatgaagtacgtcggataaatcagacacgcgaaagatatgcgacagagccgcccgccgggcggctctgcgtctatctgaaagcagggcttcaacgtttccatgtttccacggagggatcaccatgatcaagacaaaaacgcagcgctatgacacgaccgtgctcgacgcgcgcgcccttgccgacgcgctcgagatcgaggagaaggccggctgggaggtcgcggaggcaggctatgacggcacggacttcgtcgtgaccttcgagcgggaggacgcgcgatgaccgagcagaccatccgcacgcagatgctcctcggcgaggccgcgctcgcgcgcctgcgcagcagccgcgtcgccgtgctcggcctcggcggcgtgggcagctggtgcgccgaggcgctggcccgcgccggcgtcggcgcgctcacgctcgtggacgaggacaccgtcagcgagagtaacctcaaccgccagtgctgcgcgctgcactccacgatcggccagccgaaggcggccgtcatggccgcgcgcgtgcatgatattgaccccagcatcgccgtcgacgcgcgcgccgagcgctacgaggcggcgacgcgggagcggtttttcgacacggagtatgattatattgccgactgcatcgacctcgtgtcgtgcaaggtggatctgatccgcaccgcgcacgcgcgcggcatcccgatcgtgtcggcgctcggcaccggcaacaagatggatgcgagccggtttgaactctgcgacatcagtcagacgagcggctgcccgttcgcgcgcgtcatgcgccgcgagctgcgcagcgccggcatcacgcaccacgcggtcgtgttcagccccgagcccgccatgacgcccgaggcgctgtgcgccccgccgccgggccgccggagcgtgcccggctcgctgccgtgggtgccggccagcgcgggactgctgctggcgcagaagatcgtgctcgatctgtgcgccgcgccggaggagcgggcatgaagcccgtctggatcgtgctgctgtgcctgctgggcgcggcggtgctggcggcgctggtgtggttgctcgtgtggtacattgagcagcgcgtgctggcaaagtcgctcggccgtgcgtcggagggcgcggacgcgcaggccgcgtgggagcagcacatcctgcgcaagcaggactggacggccgactccgagccgggcagggcggcgctcgcgcgcgtgcgcgccggcgtcgctgccatgcaggagcagccgcacgaggatgtgtttctccccgcgctcgatggcgcgcgcctgcacgcgcggctctaccgcgtgccccacgcccacgccacggtcatcctctgccacggctaccacagccacgccgagcatgatttttccgcccagttcccggcgctgtatgcctccggcggctgcaacctgctgctcatcgacgagcgcgcgcacggcctgagcgagggcaagtgcctcacgttcggccagctcgagcgctacgacatcgcccagtgggtgcactgggtgcgcgagcactcgcgcgtgcagcggcccatcgcgctctacggtgtatcgatgggcgcggcgtcggtgctgctggcggcgcagctcccggagctgagggacgagatcgcctgcgtcatagccgactgcggctattccagcttcgagctggaggtcacggacgccgtgcaccacggtacaaatgcgccgcgctggctgcaaaagccgctcgcgcgcgcctgcgtgcgcatcctgcgccgcagcgggctggacttcgccgccgtcgataccacgcccggcatggcggcgctcgatctgcccatcctgtttttccacggcgacgcggacactttcgtccccctgcaccacagcgagcgcaacctcgccgcctgcaggcggccgcagcggctcgtcgtcatccccggcgcggagcacgccatgtccgcgcaggtcgaccccgagcgctaccggcatgagctgctgaccttcctgtggcgcaacacgaactacctctgggacgagcgcaacaagccgctcaaatgaacccgcaggtccgaaacggagccggaaaagagcatgggccggatgcgaacgtttccccactcattgcatggttttgcgccatattcgtcaaatcatcaccacttagacgcaaaaagccggatgtctgtgacatccggctttttctgccttgtatcagtcctgcagcagggacgcggcggccgtgccgatggcggaagcgttcggtacgggcttgcacacgcagtagcgctggtgcttctgcacgagaaatgcctcgagctcttcgctgacggccgggcgcaggagcgtcgagtagcgaaacagcgacccgtccacggccacgaccatcgggcggtagcggtttttcgcgccgtcggtcagaaagacgatggccgcgatgtttgcgacgatcgctttcgccgcgcggccgaacacgctctgaatgaccatggcggcggtcttgcggtcggcatccgccgcatcgctcagcgctgcgatggcgccgcagtccgggtctgcgccgaaggcgtccgcgtcggcggcggtcagcacgtcgagcgcgcggagcttgtccgccgtctcgggcgcgaacagcccgtcttttgccgcggcgatgagggccaggcggctgagcttgccgaggtagcggccgctcgtcatcttctcgaaccggtacgcgcccggtgcggccgaggccgcgtcgagcgccttgtcaaacgcgctctgcggcacgtcggtgaacgagccggactcgaggttgacgagcatctcgccgtcagcgtcgcggccgagcttttcgatcgcgcgcaccggcagcaggcagcatgtgttcgtgcccgtgccgttgacgagcccggcaaaaccgttggcgtagttgttggcgatggtggtcgagccgctcaggtacgtggcgggggtgtcgttgatgaccgtgatgggcagcttcgtgcagccgcggcgttcgagctcttcggccaggtccgcgcccacgaggtgatcctcccacccggtcagctgcacctctttggtcatgccgagcacctttgcatccagctccggcgtgttctccgccgggtagctgaagcagatgccgatctgcgtgacccggtcgagcagcggctcgagcgcgtcggctgccagccggatgaagtccatccagtcggcgtcgcgctccgagccgggcatgggcagcgtgcgctcgtcctcgaggatcggctggccgaactcgtagtgcacggtggcgacgcggaagttcgtgccgccggcgtcgatgacggcgacgcgcttgccctccggggcggcgacgtggccatgcggcgcgaggtaggccggcagcatcggcaggccgcccgcctcgccgcgcaggccgcgctgcatcgcggcgagcagggcatcggtgagctcctgcgtgtcgagctggtcgggcgcggcgccatacttgcgcaggaaggcgagcacgcgcgtgtcgatgtggatcgcgggcacgggctcgtcctgctccggcgcggcgaaggggaacggcgcgcgcggcgcggccggggcctccggggcgggggcgggcttgcttttcttgaaaaacggaagcttcatatgtgttctctctctttcttaccgaaaaccccgcgccgggcccggcgcggggacggtgatgattcggttgcaggtcaggcgttcggggcgtcgcccttggcgctctcgaccaggccggccgccagcgcggcaacgccctggatctcggacgggatgatgatcttcgtcgcgcggccgtccgcggcggcggcaaaggcctcaagactcttgagcttgatgacggcgtcggacggcatggactcgttgatgagccggatgccctcggcggtcgcgcgctgcacggtcagaatggcctcggcgcggccctgcgcctcaaggatctgctcctgctttttcgcgtcggcgcgcaggatggccgattccttttcgccctcggccgtgaggatggcggagcgcttctcgccctcggcgcgcagaatggcctcgcggcgttcgcgctcggccttcatctgtttttccatggcgctctggatctccttgggcgggagaatgttcttgagctccacgcggttgaccttgatgccccaggggtcggtggcctcgtcgaggatctggcgcatcttggtgttgacgatgtcgcggctggtcaggcactggtcaagctccaggtcgccgatgaggttgcgcagcgtcgtggccgagaggttctcaatcgcaaggatcggctgctcgatgccataggtgtagagcttcgggtcggtgatctggtagtagacgacggtgtcgatctgcatggtgacgttgtccttcgtgatgacgggctgcggcgggaagtccgcgacctgctctttgagcgacagacgcttggcgaccgactcgatgaacgggatcttcaggtgcaggccgacgccccatgtggtcttgtaggcgccgaggcgggtgatgacgtaagcctgtgcctgcgggacgatgcggatgttgcgcacgagaatgatgagcgcgatcaggatgattccgtagagaacgtatggcatggtgattcctccttattcttttgcgcccgcggtcacgcaggcgggtgtgacgatgagcttgacgccctcgatgcgcagcacgatggccgcagtcccggcggggatgggggcatcggtctgcgcgcgggcggtccatacttttccgccgatggcgacggcgccgcggccggccaggttgtcgatatcctccgtgacgagacattcctgcccgatgagcatatcggcattcgtgggctgggtacggttgttgatatattttttcaccagcgggcgcgtcacggcgaaggccgcgattgacacggcgaaaaaccacacgagctgcagccacagcggcgcgtggaacatggcggcgatgagcgcggcgagcgcgcccacggcaaaccagatcgtgaccagaccggcggtcaggccctcgacgatcagaaagatcacgatcaggccaatccagatggccggcatggtgcatgggatcccggcgatgaccatagacaaaacctcctgttgagaatgcgcggcaactgtttgccatagaaatatcatatcttatttacaggataaaagcaagcaaaacacccggaattccggcacatgaaatttccgggcggttttcctctttactttcctaaataattagagtaaaatagtatccgaaaaatcgtgtttcagcatccatatatctgatgagaaataaggagcgcatatgaataaacagcataaaaaaccgcgctgcgatgacatgtatcgtgccatcctgacgctcaagaccgtcgatgagtgcaagcagtttttcgatgacctgtgcacggtcacggagctgcaggccatggagcagcgctatcaggtggcgcagtatctcgacgcgggcctgatctacaacgacattctggaaaagaccggcgcctcgagcgcgacgatcagccgcgtcaaccgcagcctgcagtacggcaccggcgggtacgagatcgtgttcggccggctcaaggagcaggcggaaaaagctccggaggagcaggcgtgagcgcttacggcgcccttgccgcatggtacgatgcgctgacccgcgatgtggattatgccgcgttcgcggacttttatgagcagtgtttccagcaggggcgtggcgcgtgccacaccctgctggatttttgctgcggcaccggcacgctcacgcgcctgatggccgcgcgcgggtatgagatgatcgcaaccgacggctcgcccgatatgctcatgcaggcgcaggcgcacaatgccgatctgcccgcggacgcggtgcagccgctgctgctgtgccaggaggcggcgcagctcgatctctacggcacggtcgacgcggcctactgctcgctcgacgggatcgactacctgccgccggaggagctgccggaggtgctgcaccggctgcacctgtttgtgcgtccgggcgggatgctcattctggacatccgcgatccggcgtcgttccgcgcgctcgacggcggcacgttcgtcgacgagacggacgatgtcctgtgcctctggcgggcggagtttgacgcggcggcccagaccatgcactacggcatggatctgttcacgcgcgcgggggaactctggtcgcgcgcgtcggaggagcacatcgagtatgcgcacacgccggagcggctcgcgcagttgctcacgcaggcgggctttctggacgtgaccgtccggcgcgacggcccgcaggcggatgccgggcgcattttcctcacggcgatgcgcagcctggaatacggcgtctgaattgtgcaaaaactccggatgcggctcaatgcgggctgcacccgattccaagatttctgaggtgaaaacaatggatgagatcatccgcgccgtctcaaaagacggttttgtgaaaatttcggtcgtcaccgcgcgcgacgcggtgcagcgtgccaacgccatccaccactgcagcccgacggcgatcgccgccctcggccgcagcctgtgcgcggcgtcgatgctcggcgacctgctcaaggaggaaaacggcacgctcacactgcgtatcagcggcggaggaggcctcggcggcatcatcgccgtgtcggacagcgagggcaatgtgcgcggcatggtctcgaaccccgcgttcgacctgcccacgcgcccggacggcaagctcgacgtcggcggcgccgtcggcaaggacggcatgttcaccgtcagccgcgacatcggcctgcgtgagccgtatgtcggcagcacggagctcgtcagcggcgagatcgcggaggacttgtccgcctatctcgtcgagagcgagcagatccccgcggcctgcggcctcggcgtgctcgtcgataccgaccacagcgtcaaggcggccggcggctttctcgtgcagctcatgcccggcgcgccggaggagctgatcacaaagctcgaggacaacattttcatgatggaccagctcacgaccatcctcgatgaggacggggcggacgcgattattccgcaggtcatgcgcggtctcgagcccgagaccgtcctgcgccacccgatggcctatcgctgcgcgtgttcgcgtgcgcgcgtggagcaggcgctgcgccagtgcggcgtgcaggagctgcaggacatgatcgcagacggcaagaacacgcaggtgcactgccagttctgcgacgcggagtatgtcttcaccccggcggagctgcagacgctgctcgatgccgaaaacgctgacgccgcagcggattgactgtgttcggggcggcgctgccgccccgaaaatgtacatttgccgaaaaaattaccgaaaatcccttgacaatttttttggcgtcttgtataatgagcaagctgcgaaacgggagcatagctcagccgggagagcacttgccttacaagcaaggggtcacaggttcgagccctgttgttcccaccagtttttgaattgcatacgcctctgtagctcagttggtagagcaggggactgaaaatccccgtgtcgttggttcgattccgaccggaggcaccattttgcgggcatagctcatttggcagagcgccaccttgccaaggtggaggtagcgagttcgaatctcgttgcccgctccatttttttggcgccatagccaagtggtaaggcatgggactgcaaatccttgacccccggttcaaatccgggtggcgcctccagaaaaagagacacgcgagcgcgtgtctcttttttcgtgtctctttttcggagacgccgatggcgaagatcgaaaaccgagagcggaagcccagacgtcgcggactgcatgttgctcgcggcgatttttcatgctccgcatcccaaaatcattgtgcattcatctgctgcacctcctttccaaaccgagcctgctccgttgggcttcgatcagctgattgccggtgtcagcccggatactgcacggccgcctgcatgaaaaactgcgcacccgacggtgcgcagtttttaaatgtgcggatcagctcagcacttctggtgcttttgcagcagcatgggcacgcactcggcacccgcagcgccgccgaggatgagcaccgcgccgagcgcgtgcagcggctgcactattcgcagtcgggtgtcagccgcatgatcgcggatctggagcaggagtggggcgtgacgctgcttgagtgcggcaaggcgggcgtggtgctcacgggcgacggcgcgaggcttttgccgcacgcgcgggcgctgtgcgcggagtatgcgcgcctttcggcggaggtgggcgcgctgcccggccgggcgcatatttcggccgcgacgcgccagttcctgcgctatctggaccggcggaatgcgctggaagtccccgccggctgcacgggatttgacaatcaggcgcgatttgtgtataatcactacaaaatctctgattttttgtgaaatctgtcctccggcttccggagacagggaggaaagcaacgtgacatacactgtggacgacacgatgaagaagctgctcggcgcgccggaggcggtcgcggtcctcgagcggttcttccccaagatcctgaagaatccggccctgcagatgaccgccgccatgacgctgcgccaggtggccgggtttgcccagtcgggcctgacggccgactcgctcgcggagatcgacgcgcagctgcgcgcgctcccgtcgtccgatgcctgagccatttccacgcgcccccggtatcttgccgggggccgtctgctggataccattctgaaaaggactgaggtcattctatggacaacacgttaccgccgctcaagcgcattgccgccatccacgatctgtccgggctcggcaagtgctcgctgaccgtggcgctgccggtcatctccgccacgggcgtggagtgcgcctgcattccgacggccgtgctcagcacgcacacgggcgagttcaccggctggacgttccgcgatctgtcggatgatatgctgtccatcgcacaccactggcagcgcatcggcgtgcgcatcgacggcgtgtattccggctaccttgcttcgccggagcaggcgcagctgctcgcgcagacgcttgactgcatcgccgcgccggataccctcgtcgtgatcgacccggtcatggccgacaacggcagctattattccaagatcgacgaccggatgtgtgcagccttccgccgcctgctctcgcgcgcggacgtcatcacgccgaacgttacggaggcagcgctgctggctggtctgccgtacgagcccggcacgcacagcgacgcctatctcgcgcagctgtttcaggcgctcggcgcgctcggcgccggcatcgtgacggtcacgggcgtgcgcccgcagccggacgtgatcggcaatgtcgcctgcgactgccgcacgggggagatgcacgtgagcatgcgtccggcgcatcccggcgtgttttacggcacgggcgatgtgttcgcctccgccctcgccgcgctgctcgtgcgcggcgctccgctgagcgccgccctcgaaacggccaccgcgctcacggacgagagcatctgccgctcgctctggcgcgacacgccgcgccgcttcggcgtggactttgagggcgcgctgccggcgtatatccgccgcgtggaaaagatatttgaagcatgaaaaagttacaaaattcgacccgacgggatccaatcttgattccgacgggtcgatttttgttaccgtttttcgacgctgttttgcaggaatatgtcaccgtgtggtacacgcggcgagaaaaagacgcgcggttgatttcctgacgaagcgtctgattttttgcagaaccggcgcgaaaatgcttgcatttccttgaagttgtggaaaaaagttaaggaaaattgcgggaaaaatcgttttcgcggttgacatcgtgttttggatatcgtatgatacaaaagaatccgtaattgtttatgttaactttgcgccgttacacgcaaaaatgacgaggaaacacattttgttactgttttttaactttttgtgtaaccggttttgatcgggcgcgcagaggaatcccgggcgggagagccgtccgatgaggggctggggtatgaagaagtcgtttatggagcgtctggcggcgttcattgtggacaaacggcggctgtttgtggtgctgtttgccgtggcgtgcgtgctgtcgatcttctcggcgagcaagacggacgtcaacaatgagctgaccgattatctgccggactccacgcagacgcgccaggggctggagatcatgaaccgtgagttcattacttacggggatgcgaaggtcatggtgtccaacgtgacgctcgcgcaggcggaggagcttgccgagatgctgcgcggtgtggacggcgtcaaggacgtggaatttgaaaaggacacacaccattataatagtgcctcggcgctctttgaggtcacgtttgacggcgagaagctcgatgagatcagcattcagggcgtgaagaacgtccgcgcggcgctcagcggctatgatacctatatcacaaccgagatcggcaacccgaccggcgagatcctcgagcatgagatgcgcatcgtgctcatcatcctcatgtgctcgatcttcgtggtgctcctgctcacgagccgtacttacgcggaggtcccggtgctcatcatcacctttggcgtggccgtctgggtcaacaagggcacgaactactggttccatgaggtctcgtttatcaccaactccatcgcggcggtactgcagctcggtctcggcatcgactacgcgatcatcatgtgccaccattacacggaggagcgcgagcttttcgcgccccgtgaggcgaccatccgtgcgctgacgctggccattccggagatctcggcctcgagcctgacgacgatctcgggcctgcttgcgctctcgttcatgaagatcaagatcggcgaggacatgagccttgtgctcatcaagtcgatcctgtttctgatgctgacggtgtttttcctgatgccggcgctcatcatgtacatgagcccgtggatcgacaagacgcaccaccgcaagttcctgccgcgcatcgacgcgctcggccgctttgccatccgcagccgttatgtcgtgccgccgatctttctggtcatcattgttgcgggcttcctgctgagcagcaagtgcccgtacgtgttcggctacagcacgctcgacaccatcaagcaaaacgactataagatcgccgagaagaagatcaacgccaccttcggcgagacgaaccaggtcgtgctcatcttcccgttcacggactttgagagcgaggcgagcctgctcgacgatctcaacgagctcaagggtgtcgatcacattcaggcgctcgcgggcgaggaggccaaggacggctacatggtcaccgattcgctcacgccgcgcaagttcgccgagctcacggatatcgacatcggcgtgtcgcgcgcgctctacacggcctactgcacggcaaacgatgattatacgaaggccctcggccagctcgtggatctgagcaatattgacaactgctccgtgccgctcatcaacatgttcaagttcctgtatgaacagcgcgacatctaccgctcgaagatcgatgctgagaccatgaacgacctcgaggagatgtatgaccgcctcatcgacggcgaaaagcagctgcattccgagcattactcgcgcatgatcctctatctcaacctcccggtcgagagcgaggagacctacgattacctgacggtcatcaagggcgccgtcggcaaatactacgacgagtcctatttcgtcggcgagacggccaaggacaaggacttttccgacgccttcagcacggacaacacgctcatcagcatcctcacggtcgtgttcgtcatcctcgtgctgctggtgacgttcaagtcggtcgcactgccgctgctgctcattctcgtgatccagggcagtgtgtggatcaacttctcgttcccggcgctcctgcacaacaacctgtatttcctggcgtatctgatcgtcagcgccatcatgatgggcgccaacattgactacgccattgtcatctcgagccgctacctccggctcaaagaggagatgccctataaggaagccatgatcgaggcgctcaaccaggcattccccacggtcgtgacctccggcacgatcctcgccgcagccggcatgtccatcggctttttgtcctcggagaacacggtcgcgtccatcggcatctgcctgggccgcggcacgctgatctcgatggtgctggtcatgtgcgtcctgccgcagatcctgctgctgggcgattctctggttgaaaaaacatcctttacgattggccaccacgccgcgccgcagcatctgcagggggccatgcgtgtcaatggacacgtgcgcggctatatcaacggttacgtcgatgcggagatccacggccgcgtgaacggcacggttagcgcttcgatcgatatcggaaatgtgcagatggaggaggctccggcgcagactgtgccggcggcggatctgcacggtgaggagggttccgatgaaaaaacataatgtgcgccgtctgcttgcgctggtgctcgtggcggccctgtgcctgctctgcggcgcggctgcccagccgaacgccacggagatccacatctactctgcggacgatcttgtgcagctgagcaaaagctgcaagctcgatacatactcgcagggcaagacggtctatctggacaatgatgtggacctgagtgggtcagactttgtgccgatcccgaccttcggcggcatgttcgaggggcagggccacacggtcagcgggctggagctctcgggcgatgcgtcccatatgggcctgtttcgctatgtgcaggcggtcggtacggtccgtgatctgaagatcaccggcaacatcgacgctgccggtaccctcaacgagatcggcgctgtcgtcggcacgaactacggcacgatctccggctgctcgttcaacggcacgatctccggcgagaacaacgtcggcggcatcgcgggcacgaacgaaagcagcggcatgatttataactgcaagaccgaaggctttgtcgagggcgaccattacgtcggcggcatcgtcgggcagaacatcggcacgatctcctactgctcgaacaccacgggcgtgaacatcaacgccagcgaggccgttgacagcgcggaggatctcgactctctgacgctcccgaccgcctccgacgacgaggacgacgatgcgccgaagaaggccaacacgtccacggacgtcggcggcatctgcggcttctcgtccggcgtcatcatcggctgcacgaactggggcggcgtcggctttgagcacgtcggttacaacatcggcggcatcgtcggccgccagagcggcctggtctccggctgcacgaactggggcacggcctccggccgcaaggacgtcggcggcatctgcggacagatggagccgttcatcacgctcgatgtggagtccggttcgatcggtgcgatggccaaggagctcaatacgctccatgatctgatggataccctgctcaaccacacgggcgctgcaacgtcgtccctggccgccacggtcggcgtgctcagcgacagcgcggcccgcgccacggagagcgcgcgctatgtggccgagcgcaccacggactacgtggacaacacggtctcgaccgtcaacgaagtgttcatccgcatcaacacggcggagaaaatgctcgctcccgcgatcacggagttttccacggcggccgtgtcgctcgacaaggcgatcgactacttcaacaagggctttgattatctcgacatcgtcgatgaaatgaccgaggccgacaagacggcgttcaaggacgcggccaaggacctgagcacttcgtccgaccagctcaacgcggccatggactactgcgcctggctcatgaaggtcatggacaacgcctacggcaccggctcttacgacctgatcgccagccgtccggacaactggcagcagatgtccgataagtacggctatgagtacaaccccgacaacctcggcacctatgagtcgcagcgtgacgccctgctcaagggcatgggcgacgccgccaaggcgatcggcgcgatctccggcgatatctccacgatgacaaagatcatcaatctgtactacctcactgaggactccaccggccacacccgcctggattacatgagcgccgcgttcaaaaatgcgttcgacgcgctcaaagcttcgagcggcaacttctcgaccggcatgagctacctcgaccaggtcacgaaataccttgccagcaacgatccgctggatctgcccgatatcagcagcgattaccgcaccgcgatggagcagatgttcgacgatctcggcagcatttcggccggcctgtcccgcctgagcgtggagacggccacctacagcaaccagatcgtcagcgacatgaaggcggtcaacgaccagttcaacgtcgtcatgatgcgcctgtgtgatatcctcgagcttgccctgagcaaggacaagaaggacatcattgaggacgtctcggaggaagagctctcgagcacgacggacggcaaggtctataactgcgacaactacggcaaggtcgacggcgacgtcaatgtcggcggcgttgccggcacgatggacatcgaatacgatttcgacccggagagcgactccaacgtcatcaaagactccacgctgacggccaagtacttcaccaagtgcgtgctgctcgacagcaagaactacggcgacgccacctcgcgcaaggactgcgccggcgcaatctgcggctacgcggatctgggcgtcatcagcggctgcgagggctatggcacggccgagagcacggcgggcgattacgtcggcggcgtcgtcggccagtcgaagggctccgtgcgcaacagctttgccaagagcgagctgaccggccgcaactacatcggcggcgtcgccggttacggcatgaacgtcagcggctgcaacacgctcgtgaacctcaacggctccggcaactgtgtcggcaccatcgccggcgagattgaccccgacggcagcgcgtccgataactacttcgtccacgagacggaggccggcatcgacggcatcagctatgcgggcaaggcagagggcatgagctatgaggcattcatggcgcgcgacggcatcccggcggagttctccagctttgccgttaccttcacggccaacggcgaggttgtcaagacgatcacgtttgcctatggcggctcgatcgacgaatctcagattcccgactgcccgacggtggagggcaactacggcacgtggccggaatatgactacagccacctgaccttcgacctcgaggtcaaggcagagtacaccgccgtctcgacggtcgtggccggcgacctgtatgccgacaacagccgtacgccgatcgtgctggccgagggcgcctttgacccggcgacggatgtgcacatcacatcggccgaggccgacggcccgacgctgcgcggcaaccagaagctgtacatgaagtacaacgtcgagatcctcaacgacacggtcgaggacgacacggacaacaccgtctccctgcgcgtctacgcaccggataccggcgcgagctacacggtctatacctaccagaacggcacgtgggcgagcacgtccagcagccgcgacggcagctacctcgtctttaagaccatggaccgcgacctgcagttcgccgttgtcaaggcgcaccacggcccgctgttctacatcctcatcgtgctgatcgtgctggccgtgatcgttgcggtgctgcgcctgctgtactaccgcaagctgaaaaaggcggtggcagccggaacgatgaccgaggaagaggccgccacgttgcgcaagcggggctggcggatgtggctggccgaggagcacgcgaagctccaggccaagcacgccgcctccaaggaggccaaggaagccaagcgcgccgccgcagcggaggcgaaggcggccgccgaggcgcaagccgcggccaaggccgcggaagaagcggcggaaactgcgtcggcagacagcgccgaggcagcgcaagctccggcggaggaagcggacacggacgacgccgacgcgccgcagcatccctgacgcgaatcatcccttaccccataaactgcgaaaatccccgattggtctccaatcggggatttttgtgcgcacgcggcggcaaaaccgccccggccataccggccggggcggtcgtcagatatcggatcgggtcagcttatgcgcgcttccacttgacgccctgcggggtgtcctcgagcacgatgccggcggccttgagctcgtcgcggatgcggtcagcctcggcccagttcttggccttgcgggcggcctgacgcgcggcaatcttctcctcaatggcctttgcctcggggtcctcgctgctgtcggagccgaacgggatgcccagcacgtcgcacagctcgaggaagcggtcaaggcacgcctgcgccagcgccttgctcgggtcggcggcgggggagacggcggtgttgatctcgcgcaccatctcgaagatgacggagatcgcgtcggcggtgttgaagtcgtcgtccatgacggcgtcgaacttctcgcggtactggtccagcccctgtacgaaggcggcgtccgcctcgctcagcgcaccgtcgcggccgttggcgatgaagaactcgaggttgctcttggcggtgcgcagacgctcgagcgcggccttggcctgcatgaggatctcgccggagtagttgagcgggctgcggtagtggctcatgagcatgaacatgcggatgcagtcataaccgtagacggcggcggcctcgcgcacggtgaagaagttgccgagcgacttgctcatcttcttgttgtcgatgttgataaagccgttgtgcagccagtagttgacgaatttgcagccgttggcggcctcggactgcgcgatctcgttctcgtggtgcgggaaggcgaggtcgctgccgccgcagtggatgtcgatcgtcttgccgaggtagcggttggacatggccgagcactcgatgtgccagccggggcgtcccttgccccacggcgagtcccaggacggctcgccgggcttggcggccttccagagcgcgaagtcgagcgggttctccttgatgtcgttgacgtcgatgcgcgcgccggactgcagatcctcgatcggctggtggctgagcttgccgtagtccttgaatttcagcgtgcggtagtacacgtcaccgttgacctcgtaggcgtagcccttgtcgatgagcgtcgtgatgaggtcgatgatctgctggatgttctcggtggccttcgggtgcacggtcgcctcgcggacgccgagcgcatgcgcgtcggtaaagtactcggcgatgtattttttggcgacctcctcgctggagatgccctcctcgttggcacgcttgataatcttgtcgtccacgtcggtgaagttctgcacgaacgttacctcgtagccgcggtactccagatagcggcgcagcacgtcgaacatgatgatcgggcgcgcgttgccgacgtggatgtagttatacaccgtcgggccgcaggcgtacatacgcactttgcccggctcgatcggcacgaactcttctttctgcatggacatggtgttgtacagtttcatattcaggctcctttgagacgtatttgcaataaaaaagcgcccccatgccgtccggcatgagaggcgaagtccttcgcggttccactctcgtttctcgctcgccgcaccgtaacgcggtgccttcgggcaggcatttcctcccgccgcgctcccggacgcacgttccgccccgccggccagcaccctcgcagcgtccgggcgcctctctgagaccgggtgataggcgtactctttccgttcatcgcatccatcatcttagcatatgcacccggcaatgtcaaggttgcgcgccgcgcgccggtgtggtatgctggaaaaaacagcggtcggcgcatcatgcgcggctgcataggaggatcgcacatgaaaaaatatctttcgctcctgctcgcgtgcgtgctggcgctggcgctgctgtgcgcctgcggcaaaaaggacgcggcggagcagacccccgcgccggagacaccgccgacgcagacggccgccaccggcggcgtggacacgtcctgcaagctctattttccgaacgacgcggctgacgacctgagtgccgacacggcgcagatcccggacacggagccggccgtcacggtggcgtatgcgcaggcgatcgtcgcgcagctcattgcgcatgacgccctgccgaaggacagtgaggtgctcgccatctcgaaagacggcgacgcgctcagtctcgacatgaatgaggccttccttgccggcctgcgcgcgagcggctcgacgggcgagttcctgtatatgggcagccttgtcaacaccttcctcgataacttcaactgcacgaccgtgcgcgtcacggtcgaggggcagccgttctccaccggccacacggagtacgacaagccgctgcaggcgttcacgttctgagccggccacggatactgtgacatttcgggaagccgggcgcgcggctgcggccgtctggagtggtggtgtctggactggaaccggccgagcatcgacttttaccgctccctcggcgcgcagccgatgagcgactggacggtctaccgcatcgacgggcagacgctgcaggacatgggccgcagtgagtgacagacaaaatgaacccccggcgggtgcaatcagcacccgccgggggttctcatgtattcaggcggctttccggaacacgtcgtggtttttcacgaagtactccacgccggagtacaccgtcgtcacgacgatgacgacccagcacacggtgttgagccagggaatgttccacagcagcatcaggcagatggccaccatggtcgaggcggtcttgatcttgccggaccaggcagcggcgatgacgcggccgttgtccacggcgatcagccgcaggccggtcacggcaaactcgcgcgcgaccacgagcagcagcgcccatgcgggcatccggtgctgctcgacgaacagcagcatggccgccacgaccagcagcttatcggccagcggatccatgaacttgccgaaatccgacacctgattgtagtgccgcgcgatgtagccgtcggcgaagtcgctcaggctcgcaagcacgaacacgccgaacgcccagtaggtatgcccggggaagcgcaggtacatcagcaccagaaatacgggaatcaggatcacgcggaagatggtaattttgtttgcagtcgtcatgtcagcacctcattcgtggatttgttcgccggcaagatcgccgtcgtcgcagccggtgatgtgcaccgtgaccatgtcgccgggccgggccgcgccggtgaagtagaccgtgccgtcgatctccggcgagtcggcatacgtccggccggagcacatgccgctcctggcccggtgctcgcacaaaacggtcatgtcccgcccgatgcaggcggcgttgtagtcgtccatgatgccggcctgcagctcgagaatgagatcggcgcggcgctgggcctcgtccggctcgcagcggtcggtcatcacggcggcgggcgtcccctcctcgggggagaacgggaacacgcccacgcgctcgagccgcacctcgcgcagccacgtgcacagctcctcaaactcggcctcgccctcgccgggcaggcccgtgatgaggctcgtgcgcagcacaagacccggaatgcgcgcgcgcagcttctgcagcagcgcgcggatctcgtcgccggtgcagtggcggttcatgcggcggagaatgtcgttgtcgatgtgctggatggggatgtcgagatacttgacgatcttgtcttcatttgcaatgaggtcgatgagctcgtcgtcgatgatctcggggtagaggtagtgcaggcggatccagcggatgccgtcgatcttcgccagttcccgcagcagcagcgcgagactcggctttccgtagaggtccatgccccagcgggtgatgtcctgcgcgatgacgatcagctctttcacgccgaggtcggcgagctcccgcgcctcctgcacgatggcgtcgagcgtgcggctgcggtagcggccgcggatggcggggatggcgcagaacgcgcaccagttgtcgcacccttcggcgatgcgcaggtacgcccagcccggcccggtcgtgaccacgcggccgatctcctcgatcgggccgctcttgtcgccgaagtacagcggctttccaccgtgcatcacgtcctcgacggcctggcagatctggccgaagctgccggtgccgagcatgccgtccacttccggcaggctctcgagaatgtccttttcgtaccgctgcgacaggcagccggtcacgagaattttcttcagtccgccggcctttttcacctcggcgagctgcaggatctggtcgatggcctcgctcttggcgctgtcgataaagccgcaggtgttgacgatggcgacgtcgcacccgtccacctcgccgaccacctcgtggccggcctgattgagcagatagagcatctgctcgctgttgacctgatttttcgcacagccgagcgagatcaggcagattcgatatggcatgggtcaatactcctcaaagttatcctgatagcgcgcgatggccgcgcggatctcgtcgcgcccgaagccgcggcggtagagatagtccgacgcgcggcgcagctcgtcgcggtcgggtgtgtcgctgcgcaggcggcggcgcagcagcgtgtcgatctgatcgtcctgctccggcagctcctgcagcgcatcgtcccacagctcgcgcgggatgccgcggcggtagagctcgctgcggatgcgcccggcgccgtagcccttggcggcatagtgccgcacgcacatggcggcgtactgcgcatcgtcgagcaggtgcatctcctgcagccacgcggcggcgtcctcggcgttttccgggctctcgcccttttccttcagccggtcggtcagctccttgaccgacatggcgcgcgcgccgatgatgcgcagcgcccgctgccggcagcgcgagcgctcggaggccgcgcgcagcgcgcccagctccgggctcgtcaattcttttccgctgcgcaggtgaaaatccgtcacgacggcgagcgtcgtgcgcacctcctcgccggtgtcaaaccgcgccagaaagcgctccggcgcggtctgtttgagctcaatgagccgggccatcagccctgaaagtcatcggctgccacttcgacggcgcggccggaggcaatggcggccttgcgcgcctgcgggctcatgagcttgtgggcgttggcgcggatctccgcctcgatcttgtccgagacgtcggggtgctcgcgcagatattccttcatgctgtcgcggccctgcacgcgcacatcgccgtaggtgtaccacgcgccggccttgtcgatcaggtcgagcttgacgccgaggtccacgatctcgccgatcttggagatgccttcgccgtagatgatgtcgaactccgcctccttgaacgggggcgcgaccttgttcttgacgatcttggcgcgcgtgcggttgccgatcatctcgccgccgaccttcagcgtctcgatgcggcgcacgtcgatgcgcacgctggagaagtacttcagcgcgcggccgccgggcgtcgtctctgggttgccgtacatgacgccgatcttctcacgcagttggttgataaacacgacgatgcagtttgtgcggctgaccgtgccggccagcttgcgcagggcctggctcatcaggcgcgcgatcacgccgacggacgactcgcccatctcaccctcgagctcgctgcgcggcagcagcgccgccacggagtcgacgaccacgacgtcgagcgcgccggagcgcacgagctgctccgtgatctcgagcgcctgctcgccggtgtccggctgggagatgagcaggctgtcgatgtccacgccgagggcacgggcgtaagcgggctcgagcgcgtgctccacgtcgatgaacgcgacctcgccgccctctttctgggcgctggcgaggatgtgcagcgcgagcgtcgtcttaccggacgactcgggcccgtagatctcgacgatgcggccgcggggcacgccgccgatgccgagcgcgaggtcgagcgacagggagccggtggagatggcctccacgttcacgggaatgtcgtcgccgaggcgcatgatggcgcccttgccgaagttcttctcgatctgggcgagcgcggtctcgagcgcttttttcttgtcctccggcttgacggggccggtggacacgggtgcggattttttcttttcagccatagtgattcacctctaagtatcagatgcggccgacgacgacgcgccggatgccggcggtgtcctctagggcggtcacatcggtgtatttttcttctgtcatcagcgccatgacggcgtccgcctgatcctcaccgacctcgaacatgagccagccgccggggcggaggatctgcgtccagtggcgcacgatcgcgcggtagaacatcagcccatcctcgccgccgtcgagcgcgccgagcggctcgtagtcgcgcacggagctgtcgagcgtgaggatgtccatgctcgccacatacggcgggttcgacacgatgaggtcgaacgtgccaatgcccatagggggcttttcgagcgcgtcggccttgaggcagatggtgcggttctggtggttgcggcgcaggttttccttgctcacggtgagggcctcgtcgctgatgtccaccatgacgacgcgcgcggccggcagctcatgcgccagcgcgcagccgatgcagccgctgccggagcagaggtcgagaatgcgggcgttcatcttccggccgacgagcacgcgcagcgccgcgtccacgagcacctcggtgtccatgcgcgggatgagcacgtcgggcgtgaccacgatcggcaggccgtgaaactcccactcgccgatgagataggccagcggctcgccggcgatgcggcgctgcagcagggcctcgatcttctgttcattttcgtcggaggtgtacaggcgcaggtcgcgcacgaattcctccttcgtcttgccgacggcataggccaccagcagccgcgcctcgagcgcgtaagcctccacgccggcgtttttcagcgccgtgcgcgtggccagatacaggtcgttataggtctttggcatctctctatcttccagtcctttgctgacggattaccaggcgtcgctgcccttctgctctgggatgacgagctcgagcgcacggatggcgcactcgatcatgctgtcgtccggctcgttggtggtcaggcgctgcagccacttgcccggcgcggacagaatgcgcgagcagaggttgtcgtgccggccgacccagcggttgatctcataactgatggacacgacgaccggcagcagcagcagccgcaggccaatgcgcacccacggattgtcccacaagccgacgcgcaggctcacgagcgagaacaccagaatgctgatgatgacgacgacgaacagaaagctcgtgccgcagcgggggtggaagcgcgactgtggccgcacgttctcgaccgtcagcggcaggcccttttcgtagcagaagatggtcttgtgctccgcgccgtggtaggcgaacatacgctcgacgtccttcatgtgcgccacgccccacagatacagcaggaaaatgacgatgcgcagcaggccctcaaagaggttgcgcacaacggggctgtggataaagcccttggtcaggccggcgagcagcgtcgggatcaggatgaacagcacgatcgacagcgcgatgccgagcaccacggccgtaccgatgatgatgtccttggccttctcctcgccgaaatgcttttcgatccagaggtcgatcttgccgggctcctcctgctcgtcctcgggcagcaggtcggccgaataggtcagcgccttcatgcccttgaccatcgagtcgagaaacacgatgacgccgcggatgagcggccagccgaggatcgggtgcttttcgcggacccagtgcagctcctcgaccttctcgaccatgccgtcctgcgtgcggcagacgatggcctgccgggtcgggccgcgcatgaggatgccctcgatgagcgcctgcccgccgatggatgtgcggaacgagacgctggtatcgggttttgcggattcggttttgctcatatggttacctcggttagaatgaaattacgaagttaattgccgctctccggcgcgaacggcaggcgcaccgagaccagtgtgccgccgccgggggcgttggcgatcgtcagcgtaccgccggagcgggtgatgatctcgtcgcacacggccagaccgatgccgctgccgcgggccttgtgcttctcgcccttgaagaatttctccttcacgtgcggcagctcgttttccgggatgccggggccatgatccctaaattgaatggtagcagcttcactgtccgaaagaacggacacttcgatcgtcttgccgtcgcgggcgtacttggcggcgttgtcgaggatgttgagaaacacctgcttgaggcgctccgggtcgccgggcacgagcgggatctcctcctcgggcgggttgtagatgagttgcatcccgtcctgccgcagcagctcctgataggtgaagatggtgtcctcgagctcgctctcgatgtcgagcagctccatgctcaggttgaagcggccgtcctggatgcgggtgaactccagcagctcttcgacgagactcgtcaggcgcgcggcctccttggagatgatggcgatgccgcggcgggagtcgccctggatggcggtgtcgaacatgagcgtctcgctccagccggtgatggcggtcaggggcgtgcgcagctcgtgcgagatcgacgagatgaactccgactgcattttttcgctgcggctgatctcctgtgacagctcattgatcgcggtcgcaaggcggccaagctcatcgtcgcgctgcaccggcagctccgtgccgtagcgcccgccggcgatcgttcgcgtgacctccgtgatctgctcgaccgggcgcgacacgtgccggcgaaaccacagcgcgcagaccacggcgccggcggctgccgcgaggatgccgagtatgatgcccagcgcggtgctgacgcgcccggcgctcagaccgatggccgcgccgatggcgacgcacagcgctgcgtgcacacattggcccatggccatgcgcgaaaacaggccgcggaaggtgttttcctgtttgggttcgcctgcgggggtgggggtgacgtcctgcatggcctcagtagccccacttatagccgtagccccagacggtggtgatgtattccggttcggtcgcgttgtcctcgatcttgatgcgcaggcggcggatgttcacatcgacgatcttgacctcgccgttgtagtccgcgccccagacggcgtgcagaatgtcctcgcgcgagagcgcgcggccggggttttccatgaacagcttcatgatggcaaactccgtctgcgtcaggcggatgtgctcgctgtttttgtcgagcgtgcgcgagcgcaggtgcagcacgaacggcccgctcgagagcacgtcctcggtgttctcgctgccgccgatgcggcggtagagcgcgtccacgcgcgcaaccagctcggcaggggagaagggcttggtgacatagtcgtccgcgccggtcatgaggccggtgatcttgtccatctcctggctcttggcgctgagcatgaggatgcccatcttcgagccggtcgcgcggatgcggcggcagacctcaaagccgtcgatatccggcagcatcacgtcgagcagcgcaacgagcgtgtccggattctgcttgagcttttcgagcgcctcctcgcctgtggccgcctcaatgggctcgtaaccggaccggcgcaggttgatgacgacgaagctgcggatgctgggctcatcctcaagtacgagaattttcttcatgtagtccatattcctttccaaaggcagtgtgtgggcgcctttgcggttagtggcgtctgctttccgggaaagcaggaggtttgcagaaatattcatttcagtatatcacacaatttacaatagtggtagcaaaaaattacgaatcgtgttattctgtgacacaggaaatgaggtgggccatatggagcttttctggacgcagatcacggacgcgcagccggcgcgccctgcgcgcacgaaggcgcacgggagtgcgtggggcgtgtcgctgctggcgtatgcggtgcgcgcggtctggggcatcgacctgccggagacggcggagctgccgggcggcaagccgtattttccggcgtgcccgcagctgcacttttccgtcagccacacgcgcacggcggcgctcgtggcggtgtcggccgcgccggtcggcgcggatgtggagcaggtgcgcccgctgcacccggccatggcgcggcggctcgcgcaggcggactgcggcgacctgcagccgttcgagctctggacgctgcgcgagagctggttcaagctcacgggcgcgggcgacctgcgcacgatcccgttccggcgcacggccggggtgttcgtcccgccggaggcgggggcgctctgccgcgtgtatgatgccattcccggctgcgcggccgccgcgtgctcgcttgccgagcagccgccggagcggctgcggttcgtgccgccgcgcgagatttgcacttgaaatgtgcgcccggctgttgtataatcaaacagccgaatttgccggtgtgatggaattggtagacgtgcttgactcaaaatctacttcgccgcttcataccaccttggtgtaaacccttgattttgcaaggctttttgaaaactgaatatgcaatttggttttaatgtccctccatgatgtccctccgttttctcggatggggattgggagatgacttaaaataatagatgccggtgtgttggaattggcagacgaggcggactcaaaatccgttgggcttataacccgtgcgggttcgacccccgccaccggcaccataaaagcaaaacagtatagatgccgtagg

SEQ ID NO: 13977 - DNA, 15321 bp, Unknown
  gut microbiota DNA sequence
cacgctggccgaaagtctgcgcgccgaggggcgcgccgcgctcgcggccgagtacgcccagctctgggagctgacggtcggcgcgctcgagcagttcgccgccatcctcggcgacacggagatggatgccgacacatttgcgacgctctttgtgcgcatgctcgcctgctacgacatcggcacgatccccgtcgcgctcgaccgcgtgaccgccggcgaccttgaccgcatgcgccgccgcggcatccggcacctgatcgtgctcggtgcgtcggacgaccggctgccgcgcgccggcgagccggacggcgtattctcgcccgaggagcggcgcgagctgctggagctggagctcgacatcggcggcggcacggacgacgcgctctggcgcgaatacaacctcatctaccagtgcgtgacgctcccggcggagacgctcgctgtatcttacccgctctttgacggcaatggcacgcccacgcgcccgtcgtttctcgtcacgcgcatcgcgcagcttttcggcacgctgccccgccccgcgaacccggacgcgcagcgcctgctggccgccgccccggcgctggagctggccgggcgcacgctgcgcggggcgaccgatcccgccgccgtcgcggcgcgcgcgtggttccggcagcacgaccccgccgcgctcgccgcgctcacgcgcgcggcccacaccgcccgcggccggctctcgcccgagcgcgtgcgcgcgctctacggcaagcggctgtacctctcggcgtcgaaggccgagcgcttttccgcgtgccggtacgcctacttcctgcagtacgggctcaaagccaggccccgccgcccggcggcgttcaacccgccggagatcggcacgttcttccactacgtcctgcagcacacggcgcaggacgcgacggacgccggcggcttcgccgccgtgacggacgagcagctcggcgcgtttaccgaccgctggacgcagcgctacatccacgacgaactcaatgactttcgggagaaatccgcgcgctttacctacctcttccgccgcctgtgccggcaggtgcggcaggtcgtggccgacatggcgcacgagctgcgcgcgggcgacttcgtgccgctggattttgaactcaacttcgcagaccccgagcagatcgcaccgatcacgctctcggacggtgaggtgacgctcaacatgagcggcgtggccgaccgcgtggacggctggctgcacgacggcaagctctacctgcgcgtcgttgactacaagaccgggcgcaaggcgttctcgctctcggacgtatggtacggcatggggctgcagatgctgctgtacctcttcgcgctcgagcgctccggccctgcgcgctacgggcacgagatcgtgccggccggcgtgctctacgttccggcgcgcgacgtgctcatccctgccgaccgccggctctcgccggaggaggcggcccgagagcgcgccggcgctgtgcgccgctccggcctgctgctcgacgatgccgccgtgctgcacgccatggagcacagcgacacgccgcagtacctgcccgtctcgccccgtcgcaaaacggacgcgctcgcaagcgcggagcagctcggcctgctcgcgcggcatattgaaacgacactgctcgacctcgcgcacgagctgcgcggcggtagcatcacggccgacccctacttccgctccgggcaggacacggcctgcacgcactgcgactatctgaccgtctgccacttcacgcccggcatggggggcgactgccaccgtgtgctcaccaagctcccggccgacaaggtctggagcaacctgaaaggaggcacgccggatgcctgaactcaacttcacgcccgagcagcgcgccgcgatcgacacgcgcggcagcaccgtgctcgtgtccgcggcggcgggcagcggcaagacccgcgtgctcaccgagcggctcatggcctacctcacggacgcggaacatccggtcgatatcgaccatttcctcgtcatcacctacacgcgcgcggccgcggccgagctgcgcagccgcattctcgacggaatctatgcgcgcattgcgtccgaccccgaaaaccgccgcctgcggcggcaggtcgcgctgtgcgcccgcgccgagatcggcacgatccacagcttctgcgccgacttcctgcgcgccaactgtgcagccctcgccctcgcgccggactttcaggtcgccgataccgagcgctgcgccgccctgcgcgcagcggcgctcgagcacacgctcgagcgcgcctatacacgcctcgacaccgacgcacccttccgcctgctggccgacacggtcggcggcgggcgcgacgatgcgcgcctgggcgagctggtgctctcgctctatgacaaaatgcagtgccacgcacggcccgagcagtgggcgcagcggcaggtggacctgctcgcgctcgacggcgtgaccgacgccggcgctaccccgtgggggcaggcgctgctggcgcgcgtgcgcgagagcgcggcgcactgggcgggcgtgctcgataaacagctggacatcatggcggcgcaggacatggcgtggctctacggcatctacggcacgagcttcgcagagacggccgatggtctgcgcgccgtcgtgcgcgcctgcgatcaaagctgggacgctgccgtggcggcgctgcagaacgtaccgttcccgcgcctcggcagcacgcgcaagccgcccgacccggacgtgcgcgaccgcgtcaaggcgcagcgcgacgcggcaaaaaaagccatccaggcgctgcaaaagcagatcaatgtcccctccgcgcaggcgctggccgacctgcacacgaccgccccggccatgcaggcactgctggcgctgacgctggacttcggcgcggcctacgccgccgaaaagcggcggcgcagccttgtggacttctccgacctcgagcacatgaccgcgcagctgctcacggacgacgacggcgcgccgacggagctggcgcgccagctctccgggcgctacaccgagatcatggtcgatgaatatcaggacgtgtcggaggtgcaggatctcattttccgcgccgtgtcgcgcgacggcaataacctctttttcgtcggcgatgtcaagcagtcgatctatcgcttccgcctcgccgaccccacgatcttcctcgacaaatacgcgcgctttgcagattttcgcgcagccttgcccggtgcgccgcggcgcatcctcctgcgggagaatttccgctcccgccgcgcggtgctggccggcgccaaccacgtcttttccaacatcatgtcccgcgcgctcggcgagctggactatgacgacgcggcccgcctgcgcgccggagcaccctacccggacgacggcgaaaagccggagctcgccgtgctcgaactgccggacgcggacgacgacgcgcccacgccggaaaaatccgtgctggaggcggactacgtcgcgcggcgcatccgcgcgctgatcgacggcggcgcatccgtgtgggaaaacggcgccgagcgccccgcgcactacggcgacgtggtcatcctgctgcgcagcgccaacagcgtcggccccgtgtaccgcgccgcgctcgaggcgcagggcatccccgtatcggcggagacgagcggcgggttctacacgtccgaggaggtgtcggtgctctgctcgctgctggcggtggtggacaatccgcaccaggacgtgccgctgatcgcggcgctgcgctcgccgctgttcggcctgacggcggacgatctggccgccgtgcgcacgtgcgaccgcgagcacgatttttacaccgcagtcacgctcgccgccgagacgcgcgacgactgccgggactttctcgacgtgctcgcgcgctaccgcgcgctgtcgatcgagctgccgctgggcgaatttctgtggcacgtcgtggacgaccgcgccgtcatggcgctcacgagcgcgatgccggacggcgagctgcggcggcgcaacgtactgctcctgctcgacctggcgcagcagtttgagcgcaccggcgcgcgcgggctgcaccgcttcctgctctggatgcagcggcaggcggccgagggcgaagagcccaccgtccccggcagcgagagccgcagcgtgcgcatcctgagcatccacaaatccaaggggctggagttcccgttcgtgtttttgtgcgacacggcgcgcctgttcaacaaatccgacacgcgcgcgagcgtgctcgtgcacccggcgctcggcctcgggccgaagtgcacggatctcgagcacggcgtggagtaccccaccatcgcacggcaggcgatcgcggcgcagctgctgaccgagacgctctcggaggagatgcgcctgctgtacgtggccatgacgcgcgcgaaggagcgcctcatcatcacgggcacgacgcacagcatcgccaaaacgaccggctggctggaggccaccgcgagcgcgccgctcccgccggagctgctgcgcggcatggccagccccctgttctggctgctgcagagcgcgctgctcgaccgggacgagcgcttcctgcgccggaactacgtctatctgaagccagacgccgcggcagagcgcgcggagacggagaccggacccgcgctgccggagcccgaccccgccctgctggcacagctcgagcgcgcgctcacgttccgctacgcgcacgcgcaggcagtcgacctgccgtcaaaggtgacggcgacggagctcaagcggctggaggcggaggatgcgccgcccgaggacgccggcgcgccgctgctggcgggcgcgccgcgcacgcagacctttcgccggccggacttctcggcgcgcgcgcgcaagctcaccgcggccgagcgcggcacggccacgcaccgcatcctgcaatacctgcgctttgccgacgcgcgcacgccggagggcatccgcgcgcaggtagaaacgttgaccgcgcgcggtgaactcacggggcgcgaggcgcaggccgtggacacggcctcgctcctgcggctgggccgcaccgagctcggcgcgcagctcgcggcggcagaggcagccggcacgctgcggcgcgagttttgcttctcgctgctgtgcccggcggagacgttcttccccggcgcgggtgaggagcaggtgctgctgcagggcgtggtcgatgcgtggttcgaaacaaaggacggtctcgtcatcgtggactataagaccgaccgcatccgccccgagggcgtgccggcgcgcacggcgtactacgccgcgcagctgcgcgcctacgccggggcgatggcgcgcatcaccggccagccggtctgccgccgcgtgctgtattttctgcactgcggccaggtcagcgacgtgccgggcccggatgcgtaaaaaaatgcgaaaaccgcttgcaattttgtcaccggtatgctagaattcagattgcgttttgtaaccacggaccagcccgtgctcaagacagcttattatgaggtgaatgactatgaaagacggtatccatccgaattaccagccgaccacgatccgctgcgcctgcggcgccgtgtacgagacccgctccacgaagcagaacatctccatcgagatctgctccaagtgccacccgttctacaccggcaagcagaagctcgttgacaccagcggccgcgttgacaagttcaacaagaagtacggcatcaagtaagatcggacaagatccttgcgaaaagcagcccgcgtgcactgcacgcgggctttttcgcgccctgcggcatttgtgacgtcataaagcctcgtctccgcccgtacccgcggtcgagcctccgcagccggacgaccgaaaagctccgtaacgtcacgaagcctcgcagagtttgcgtccgcagatgcaaaaaaattccaatcattttctctggcggcgtgtacgacggagaaaataccgctcggctcgcaaacgtgcgcattgggcgcctttggtgtacaatgcgtgcgctgcagcgagctgcgatctcttccacagagggcccagcgaagcggtcctctgtggagcgtgtgcctgcggcacacgcaaaaaccccgctgccgaagcagcggggtttcgatttatgcgatttgcgaaacgctcagacgatgcgcttgtcgcgcacctgagaatcgtagtgcttgttcaggaaggggcgcagcacatagtagatgagcttgttctccagattgaacatatagatcgtgaaggtcgcaacgaagccgataaagccgaccaggccgaccttgcccataatctttgcagcgagtttcatattcatagtcggtacctgcctttcttagtacgccgcggagtcgtcgaagtcgaccagcgtcgggtcgagcggctgctcgttgagcacgatggacatatactcgttgacgcacttacgcatatcgcggcgcggcacggtgcggcagtcctcgaggtcgtgctcgatgaagatgaagtggaagccaaggtcgcgtgcctgctcctccatcatggcgtgcacgccgagcatacccttgcaggcgatgttgtcgttcatgagcaccatgtcgcagttgaagttcgtggcccactcccagacggagttgacgttgtcccagccgccgacagccatgtgacgcataacgcccttttcgctgaacagcgccagatccatgagcgcctgatcggggtcggtcgtgctgatcatgttgtgacccatggtggagtccatgttcaggacgatgttgatgccccagcagttctgcgtccaggtcgggaagtcggtgtagtacacggcggacggtccccacaggaacgcacggtgacgcgtggtgccgccatacgggacgtacttattcttgtagcacttgcgcaggatcttgatgaccttgcggtcgttcttggtgaagtagtcctcctggccgttggcggaggcccaggcgtacagacggtacagggtctcgctgatgccggtcagcgggcagtagggagtcttgaagtaatcccacttctcgagctcgatctcgttttgctcgttcatgtgcttggcgcgcttgaacagggcgttccagtcatactcaacgccgtattccttttcgacgaattcgatgcagtcgcgcaggacctgcgcggagtacgggtgggcggccggctcgttgtggatcatggccatggtgatctggaagtccggcaggccgatgcggcggcgctggaacatggacgtcgcctcggaggcgttgcagggcatgttcgtggagagcatggccttgccgaagagcgggaagtcgtcgttgagggcaacgccggtctccgccgcgcagcgggagcagacgtctgccggcagaccgaaggactcggctacgtcgatgtagtacggctcgagctgctggtcaacatcgcagatgatgaactccggtagcgtctgcagcgggatggggatcaggtctttgaagccggtcaggaacagcggcggcatgacctcgtccacagggatgatcttatcgctgtccttgccgccgatgcgcaggtcgtgagacagcacaagggcgatcttcttggtcaggctctgcacgatggcgtgcatattcatgtgcgcgatcacgagctcggggccgcggtagccctcaaacagacggtcgatgaacatgaacgtgccgaggtaggagcccatccagcggtattcccagaagcccttcaggcacgggatcggcgcggaggcgaccatggcagccatggacatgacgtttttgagccatgcacggtagtcgaccatggtgtcgtgcagaccacgccactcacggtacttggcgacgccggtcttatcatagtaacggctgcggagaccgccgacaccgttctgagcctgccagagggggtcgaatctctgcatcttggagtcaataaatttcgtaacagggcaattcatagttttcattcccctcctgtgtcaagaattgattttcttgatttccagactctcgacgaaggcctggaaacgggtacggagctggccgatggagccgagcgcgtattccttctcgatcgtgcagcacggcacgcccatctcctcggtcaggatatgggaggcgagcaccttctcatagctccagaactcgcagaacttcatgttctcgtagatcacgccgtcggcatggaactcgtcgacaaggcgcttgacctcagcatggcgctggtcgatcttcgcaccctccatgaagcgggcgcactggttccagtgcaggtagtggcggcagatggcgtcaaacgcggtctcgccgtcctggatctcgatgcgctcacggctcgggaagctgccgaagcagtagcggtcggccacgaccatggcgccgcaggtctcgaggagcttcgtaaactcgggatcgtcgatctcggagccggcgaccacgacgcgtgcgcggaaggggaattccttctcgggcttgcgctttttgatctcggcgagcgtctccttgaggtacgggaggatcaggtcgtgcgggcagacctcgctcacgagctggatgacgtggaactcatagccggtaatgggcgggttgggcagcttgcggaagttgccgatctcggtgatgacatcgcacagctcgttgaacttctcgatggtcgcgcgcatggcggcatcggaggtgtccacgccgtagcgctcggcaagctggtcaacgaccttgagctgcagctggcccttgtagtagtcatagctggtcttatcgcccttgagcgggggatcgatctgcgtgacgaagaagcgatcgttcttcacgggattgatgaggaagaagtgctcttccatacgctccatggacgcgcagcactcggcgccgaagagcgcattgaggtagttgtagccgccctcaatggcacgctcgaggatggagcggacatacgggcagacacggctggtcatgtagtaggtcgcaatgtcggtcgactcgcagcgcggcgcgcgcaggcggctcgagaagcagcccggcaggttgagcagaacctcggggatgtaatagcagttgtacccgagggcgattttcccgtcattgaccgcctgcgtgacgagctcattctgcgcgtcctgcaggagattttcgaagaaaatcagatgtttcaggtctttcatattgtcccttctttcaaaataattcccattgcagctatgtaaaaaagcgtcgggatgcgggtgcattccggcgccttcgacatacgaaaaaagcctttgcggcgtcccctggccgcggcggaacgagcaggcgcttgctctaccacctggtcataataaaaatatcacgtgttccatgcggtgtcaaccggttacacgctaattctttcacaaatccggacaagagggcgactttcgacacatttgttgagaaatgacactcaaatccggtcggcggggcgcaaaacgcgcagatacgcctcgctctggcgcacgaaggcggcggcgtcaaagttgtcgttgcgcagcgcctcctgcacgatcatgccgtcggacgcgagcaggatcagctgcgtgagatagtcggcggagacgacgtcggtgcgctcggcgatcttctcggcgatgagccgctcgaacgcggcgtagcggtcgatgagcttggcgcgcagcgcctcgtcgccgagcatggcggcgtggatcaggtgcaggcgcatgccggcggaggcggtgttgcgctcgacgacgtacttcaccagccggtgcacggacgtgtccttgtccttattctccgtccaggcaatcagctcgtcccactggcggtcgagatagcggttggtgatgtcgaaaaggatatccgttttatttttataatagtaatagagcgtccccttggacacgccggccgccgcggcgatctcggccagcgagatatcggcaaacgtctgcgtgtccaacaggccggtcgcggcgtcgaggatcttctccttgacattgtcgttgcgcggagcggccatttgctttcctcatttctgatcttatgagataaatcgtgtcttattgtacgcgattttgggcgatttgtccagtctggcagggaaatttcagcagatttgacccagggcgaatccttgacttcccggtcgaaaaagggtatatttgtgacatccagtcggccgcttggccgactcatcttccgggaggcctgtctttcatgaagatctccgcattgaaccgaaaactgcaccgcgccttcggcggccgcgtcacggcggcgctggccgacggctgcatcgtcctgcgcggcgaacttgatcgctgggacgacgtggtgcgcgccggccagatggccgcaacgaaatattccacgtgccatgtcgtcaatgacatcacgttcaccggcggcaaggacgcgcccatgcgcgtgcccgcgctgcatgacgatgcgctcgacgggcagacgcccgacgtgctcatcatcggcggcggcatctcgggcgtgtcgatcgcgcgcgagcttgcgcgccagaagctcgacattctcgtcgtagataaggaatgtgacctcgcgctcggcgcctccgggcgcaacgacggcgaggtgcacccgggcatcgacctcgggcgcggcagcatcaagcacaaatacatccgccgcggcaacgccatgtacgatcaggtctgcaaggagctcgacgtgccgtttcaccgcgtggggcaatatgtctgcttccagcacggctggctgcgtcccgccgtgtggggctactgcatgtggcgcaaatatcacgacggcatcgccgacaccgagctcatctccggcagggagctgctgcgccgcgagccgaacttcaacaaaaagacccgctttgccatctcgaacccggactccggctgcgtctgcccctacgggctgacgatcgcctacgcggaaaacgccgtgcaaaacggcgcgcgcatcgcgctcaacaccgccgtgctgggcatggacgtcgcggacggaaagatcaccgccgtgcacaccaaccgcggcacgctgcaccccgcgctcgtcatcaacgcggccggcgtgttcgccgaggacgtggcgcgcatggcggatgaccgctttttctccatccacccccgccgcggcacgaacagcatcctcgaccgcaaggccggcgcgttcatgcattcgatcgcgtccgtgaagggcagcgacatggtgtcgaaaacgcactcgaagggcggcggcatcctgcacaccgtgcacgacaacctgctcatcgggcccgacgcggtggagacctatgaaaaagagaacacggcgacatatcccgagagcatcgcgcacgtattcgaaaagcagaagatcacgatgcccgcgctgaccgagcgcgacatcatcacctatttcaccggtgtgcgcgcgcctacgttcgaggaggatttcatcatcgagcgcggccgccgcacgcacaacctcatccacgtcgcgggcatccagtcccccggcctgacgacggcgcccgccgtcgcggtcgacgtggcggacatggccgtgcgcatcctcgcgcgcgagcgccccgtggccatcaatccggactttgacccccaccggccgggcatccccgtcctgcgggagatggacgacgccacgcgcgcggcgtacattgcgaaaaaccccgactatggcgtcatcgtctgccgctgcgaggagatcagccgcggcgagatcctcgacgcgctgcgctcgaacgtgtgcgtgccgacggtcgacggcgtgaaaaagcgcgtgcggcccggcatgggccgctgccagggcgggttctgctcaccgcaggtggtgcgcatcatcgcggagtatctcggcgtgccgctcagcgcggtgcgcaagtcctcggccgacgcgcccatcacgttcggcccgacgaaatccggggaggtgcaggcatgatgtacgacgtcatcgtcatcggcggcggccccggcgggctcgcggccgccatctccgcgcacgaaaacggtgcgcacgtgctgctcatcgagcgcgaggcgcgcctgggcggcatgctcaaacagtgcattcacgatggctttggcctcgcccgcttcggcgagcggctggccgggccggaatatgtcgagcgcttcatcgaccggctcgaggatctgggcattgaggcgcacacacagacgttcgtcacgcgcgtggagaaaacgcccgccggcttcgcggtcgtcaccgtcagccgcgacggcgtcgcgcgctatgacacccgcacgctcgtgctggccaccggctgccgcgagcgcacggcaaaacaggtctttatccacggcacgcgcccggcgggcgtgttcacggccggcaccgcgcagcattttacgaacctgctcggcgagctgccgacccggcgctgcgtcatcctcggcagcggcgacatcgggctcatcatggcccgccgcctgacgctcgagggcgcagaggtcctcggcgtgtacgaggccaagtccactccctctggcctgacgcgcaacatccaccagtgcctgcatgactacaatatcccgctgcacctgagccacacggtcacgcgcgggttcggcgcagaccggctcacgggcgtggaggtcgcggaggtcgatgaggccatgcgccccatccccggcacggagcagcgcatcgactgcgacgcgctgatcgtgtccgtcggcctcatcccggaaaacgagctggcggagtcgctcggcgtcccgctcgacgggcacacccgcggccctgtgtgcgacgggcagctcatgacggaagtgcccggcatcttctcgtgcggcaacgcgctgcacgtcaacgacctcgtggactatgtgtccgcctccggcgagctggcgggcaagagcgcggcgcactttgccgcgcacacacgcgacgagatcgcgctcacgatctcggacgatttcggctatctcgtcccccagcggctcgaccgcacggaggacaacagcagcgtcacgctgtatttccgcagcgcggcggtgctcggcccgtgccgcgtggtgctgaccatcgacggcaaggaaacctggtcgcggcgctaccccttcctgcgcccgcccgagatgcagcagctcacactggactttgacaagctcggcatcgcccacgcgcgcgatgtccactttacgatcgaggtggcagaggcatgaaagaactcacctgtatcggctgcccgcgcggctgcaccttgaaaatcgaacgcgacggcgacggctggtccgtcaccggcaacacctgcccccgcggccgggagtttgccgtttcggagatgaccgcgcccaggcgcaccatctgctcaaccgtgcgcacggccttcccggacgcgccggtgctgccggtgcgcgtgtcggccgacattccgaaagaccgcatcttcgatgtcatggacgcgctcaaaaccgtcaccgtatccgagcgtatcggccgcggcgatgtcgtgatcccggacgtgctcggtctcggcgtggatgtcatcgccacgagcagcctcctcaggcacagacccgaatgaatattttgtatcgagagcaaaaataaatcttaggagggaatcatcttgagcaaaccgctggtgctgacgtgcgacatcggcacacagagcgcacgcgccctgctcgtcgacccggacggccggatcgtagacgtcgtgcagagcaagtatgccgagccctacttctccaaagagcccggctgggccgagcagaagccgaacttctacttcgaccgcctgtgcgagtgctgccgcgagctgtgcgcgcgcagcaacgccctgctgccggacgtgatcgccatgacgatcaccgtcatccgcgacacggtcgtgtgtctggacgcgaacaacgagcccctgcgcgacatcattctctggctggataagcgcaccgttgacccgaacggcgccatgcctgtcaaaaacatgatgctcttcaaggtcgccggcatggagccgacggcgaaggtagtctacgccgcctccgtcggcaactggatcatgcgccacgagccggagatctgggccaggaccgccaaatacgtcatgctgcccacgtacctgaactacaagctcacgggcaacctcatcgactcggcctcgaaccagatcggccacatcccgttcgactacaaaaaccgccgctggatgaagcccggcagcctcacgcgctgcttctgcgacgtgccgaacgaaaagctgtgtgacctcgtgccctccggcacggtcatcggcacggtcacggacgaggtctgtgccctgaccggcatccccgccggcctgccgctgatctcgaccggctcggacaagggctgcgagacgctcggcctcgccgtcgtcgattccgacaaggcgtccatctcgctgggcacgacggctaccatccagttcagcacgaccgagtacgtcgagccgcagcagtttctgcccgcctaccccggcgtgctcaacgaccactacaatcccgagatcgagatctaccgcggtctgtggctgctgtcgtggttcgtcaaggaattcggcacggccgacgccatcgatgccaaggaaaaaggcatggcgcccgaggccctgctcgacgagcgcatccgcgacctgcccgccggcagcgacggtctgctcctgcagccgtactggacggccggcatcctgcacccggactcgctcggcgcggtcatcggcttttccgactaccacacgcgctaccacttctaccgcgccatcatcgagggcctgtgcctggagctgtacatggcgctgcgcatcatggaggaccgctcgggcctgaccattcacgagatccgcatcggcggcggcggcgcaaagagcgacgtggtctgccagatcgcggcggacgtgttcggcctgccggtcgtgcgctcgcagacgcacgaggcgtgctccatcggttcgtccatggtcgcgttcgtggccaagggcgtgttcgccgatttcgacgccgcggccaaagccatggtccacgtcaaggatacgttccagccaaacgagcggaatcacgaggtatataacgacatttacgagcaggcctaccgcaagatctacccgcgcctgcgcccgatctatcagaaactgatccaagtcaagaggaggattgcacaatgagcaacaaaccgtacaaaggattcgagccgaaatggctgctcacccccgcgccggcggacagctaccgctccatcttccgctggggcgacccgaacttcttcaaatacccgaaggagtctctgtacacgctcatgaaagagaagttccagatgacggacgacgatttcaaggcatattccgacgacaccggctttgaccccgtggagctgcccg

SEQ ID NO: 13978 - DNA, 2749 bp, Unknown
  gut microbiota DNA sequence
actgcgtctgcgccacaagcgcatcgacagcgtgcccgacgtcgtgctctaccccgagacgaccgagcaggtcgagcagatcgtggcctactccaccgagcaccacatcccgctgtacgtctacggcggcggcagcagcgtcacccgcggcgtcgagccggtcaagggcggcatctcgctggatatgcgccgcaacttcaacaaggtcatcagcttcaacgagatcgaccagaccatcaccgtgcaggccggcatgtccggcccggatctggaaaagacgctccagagcgcgccggagctcttcggcgccaagcggcagtacacctgcggccacttcccgcagtcgttcgagtattcgagcgtcggcggctggacggtcacgcgcggcgcgggccagaacagcacgtattacggcacgatcgccgacatcgtcctcagccagaagtacgccacgcccatcggcacgatccagaccagccactactcccgcgaggccaccggcccgaacctgaaccagatcatgatgggctccgagggcacgttcggcgtgctgacggaggtcacgctgcgcatcttccgctggatgccgcaaaaccgcaagcgcttctcctacatcttcaagacgtgggacgaggccatgaaggccgcccgcgagatgatgcagtgcgagtgcggctactcgtccgtgttccgcctgtccgacccggaagagaccaacctcatgctcaagctctataacgtcgacgagacaccgctgcagccgctgctcgacaagttcggctacaaggacatggagcgctgcctcttcctcggctttaccgacggcgagaagggctacagccgcaacgtcgcgcgcaacattgcaaagatcgcgctccgtcacggcggcatgccgctgaccggctacgtcacccgcagctgggagaagggccgcttcaacgacccctacctgcgcgacacgctcatggacttcggcatcacgaccgacacgctcgagtgcacggtcaactggtcgaacatggagcaggtgcacgccgacgtgcgcaagatctgccacgcgctgccgaacaccgtcgtcacgacgcacatgtcgcactgctatccgcagggtgcgaacctgtatttcatcttcctcacccgcatgcaggatgaggacgccttcaaagcctaccacaccacgattctcgacgcgatccagcgctccggcgcggccgtgagccaccaccacggcatcggcaagatgttcgcgccctggctcgagggctacatcggcgagaaggagtacggcgtgttccgcgtgctcaaggactactttgaccccgactataacatgaatccgggcggcacgatcggcctggacctcaagccggaggaaaagaagttcctgcgcgagtacaccgactatctcgagcagccgaaattcgactgagtttttgtcatcacccggcagcggtttggatgcccgccgccggatcaccggccaagtgccaatgctgctgcgtagatcgtttgtgcagcaggggggagaaccggggcggcccgccgccccaagggatggagcagcccggcagatacctgccgggctgctttttcgcggcggcacgcaaaaaccgccgctcatgttgagcggcggccagactgtcaagggacctcgtagagtttgcgcctgcgggcgcaaagaaagtccaatcattttcttcggcgacatgtgcggcgaagaaaatacttctcaggctgcaagtgtggaatttgtgcgccggcgacgcacaaattatgcgcgcagcagactgcacccccccttgtcaaaaagtaatactttttgacagtctcaaaaaaccgccgccccggccagggcggcggttttctggtcttcagttggtatgcggctgcagcgcacggcgcgtgacgcgcagcagcgtcggcagcagcagcgcgagcacgatacctttgcccgcgcagatggccagccgcagcggcagcgtgccgaacacgaacaccggcgaatagtacccgtagatgaggctgtcgagatacagcgacccggtattgagcaccgtgatgcccagctcaccgagcacggccagcagcgcgagctgccgcggcgtgcaatcgtaaccgtgccgcgccgacaccgcgcccacgcacagccccagcagcacatacggcgcgatccagagcgcagtcgtggcactcacgccgaagcgcagcagctggtacagcagcgtacccaccccgccgatggccagcccgtcgaccgggccgagcagcagcgcaccgagaaacaccggcagcgcctcgacggtgatcttcaggttgccggtgctgatcgacaccagccccagcaccgtgaccatggcggcaaacattgcgtccgccgcgaggcggcgggcggtccatttcgtatgcatttgcaagactcctttcgtgacagttgccacggcgggggtcttcccttggtggcagcggaagcggcaacagcaccgcggggcgcgcgaccccttcgtcgccggacaacttcccatcccggcgcacttgacgcgctgttcctactctgtccaatgcattgctcagatttccgtgtgcatcatagcacacgcggcccggctttgcaagccgcaaaaaaggacgcccgggtgggcgtccttttctgccttatgtcttactttttcgcgcgtgtcagacggcgcgtgagctcttcgaccagcccgtccaccagctcctgatggtcggccaggttcagctcggcctc

SEQ ID NO: 13979 - DNA, 1006 bp, Unknown
  gut microbiota DNA sequence
gtcagcgttccggcggacttcatcacaatgtctacgccaacaggtcggtttgcgctcactgtcgtcacatattcgggtatctgcgagacagcgtagtccgaggggttgtaagtgacgtttttcagatacctgtctacctctgcgcggcactgatcaaatgtgtacacttcggtttccattccggtgttcaagcgcctcacagcatcgcccatctccgcgactttgtatttcgttgcagtgccatttttctcgcggatagctgctgcaatgtcctgtacggcggtttcttcgtagagctttttcatctcagtagctcacctccgagccatcggcgatcgtgacggttttcgccgcgctgccgtcgtaggtgacggtcgtgccgccgattttgatcgtcagcgcattcggatttttcaaggccgtggggatgtcatccatagatgccagccgcgtatcgcttgcctgcacagtgccattgacgatggcgatagtcatcgtctgcgctgggaagcccattgcggacagcgcaccggcgccggaaaataaccatgtgttcgagctgggcatcggcagaaacaacggcagaaccgctgtgtacatgcccatggcgaatcggcatttcagctccttccccgcctcatacgccgccttgatgtcggccatcgccaccgggcaggtgtagctggggtattttccagcaaggtcgatgtagaatacctccgcgcccggcccttgttcacctctcgacggcttgccggtgtcatcatctccaatgtaccagttgccattatctccgatgtgtggcgtgatgccgtctgcaccggttgctcccggtttgccatccgcgccgtctttgcccggcgctccggttgctccgcgcgatggcttgcctgtatcggtgctgccaacgtaccaattgccattgtcaccgatgtgcggcgtaacgccgtccgcaccagcagcccccggtttgccatcggcgccgtctttgcccggtgctccggtt

SEQ ID NO: 13980 - DNA, 7548 bp, Unknown
  gut microbiota DNA sequence
atgatatacatttttgcgctgcacacgcccatgtggacaaaggacaacgtcaactactgtaagaccctcctgaagcttgaggtggatgaaaggctgggtatcttcgattttgtcgacgcttacaatgaactgtactacaagctcttatccaactgccagaagaacggcatcataaggaaccttggcaagccggagattttggtgaaatattctatacaaatcgctaaggcgactctcctggactggtgctgttcaaatgccgccttcgacttccacgaggctgtaaggacgggcatggaagagtactacgacgtcgctccggcttaccgtaaaagctggtaaagcaatatgcagcacaatgcccggctctgttttggagccgggcattgccatgttgattatcgtatctttttaaagggtgtgcaagaacagcgccttactatgcttcagttcaggctgtagccgaacttgctgccgtggaggactgccttgttgatcttgccggtggcgatggcatcgcccgccttccagacgctgggatggccggaagcaagcagctcctgccacagtgcgtcgttgggcttcacacccacggacagaacgatcacgtctgcgggaagctccttcacctcgccgtccttggtgctctcaatgaacagcttgccgtcggcaaatttcacaaccttgttattataaaatagggcaacaccctgatcgttgcagtggcggacctccagcagcgcttcgttctgatagcgcatatccagcatatccaccggccattcgggcagcatatccaccacggaaacctgattagtgccctgacggttgatatacagcgcagtctccagcccggtaatgccaccgccgatgacaacgaccttcttgtttgcaaactgcatgtcgttggcaagcacgtcgtgcgcctgaaccgtctgtacctgatccagcccctcgagtgggatggaaatgacgttgctgccggttgcaaccagaatggaatagggtttgagagccagaacctcctgcgccgtgacctccttccccagcttcatcgtgatattcagcttctttgccatggacttataatagtcgatagcccactcaaatttgcccttgaaggggggcttctttgcaacatggaggttaccgccgatctcatcgcgtttgtcgaacaccaccacgtcaaagccgcgctgtttgagcgtgaccgcagcttccatgcccgcggggcctgcgccgatgaccgccaccagacggccgtccccgtcctgaacgatggggcgcttggagccttcgcgcagggcaaaggggttcacggagcagttcgtctgctcatagctgaacggattgacattgaagcaattcatgcaggagatgcagtagcgaagctcatcctcgcgaccttcggcacacttctttacccattcgcgctcagccagaatgccgcggcccatgccgaccatgtcgcacttgccgtcattgatgatctgatccacgaaatccgggtgacggatgctgccggtagctactacgggaacggaaacagcattcttgaccatggtagcagcaggaaccttccagccttcggcacgatgcacatcgccggacataatatcgtcctgatgatatattgtgccgccggcggacactgcaatcatatccgcaccggccttttccagatagggagcgacctcggcggcctgttccggcgtgattccgtcgttgccgttgggaccttcactcttggggtagtcaaagccctgcattttcacggagatgattttatccggtccgatgaccttgcggatgcgggtcaaaatctccgtggcaaaacgggtgcgatcctctaccttattccagccgtactcatcagtgcggtgattgaacagaggagaaatgaactggcaggccagatagccatgacaggtttggaactcgatgccgtccgcaccggcggccatagcacgcttggcagcggccacaaacttgtcctgaatggcgtggatctcgtccttcgtcagctcgtccacagtcttcggatcaatgccggaatagttggttgcgccgggatgccaaagctggaacaggatctttgcgtcgtacttatgggcagcaagcaccagcctgcgaagcccggggataaagcggtcatcataaatgcccggctgcaagggcagcacagaaggccactccgggtctacgatcattgcgccgggaacaagaagccccacgccgcccgcggcgaccgattccacataggcgatgtcttttgcggatacgctgtcgtcgaaattagaaatattctttgccatcgcaaggaacatcactctgtttttcacggtctgattaccgattttaataggctccaaaaatttatggctcatgatgtgacctccttatacaaacatggcttcaccggaagcgcggacagtcagctcactgatattcacgccccaaggctggtcaatggcgtaaatgatgttgtccgccagaatagacggagaaaagtcaaagcaatggatgctctccgtgtcaagacgatcggggatcgccaaccccataaatgcgtcaatgattttcccgtaaatgccggacagacctgcattataatctacttctgtagagaccagacccgtatttgccacggatgtgggcttgatgttggtaactttgattttcccgcgggattctacgcgcaggctgtcgcccagcattctgacggcggcctttgtcacattatagaccccgcaaccgctcacgggatagttgccgaggatggaggaaatgttcacgatatgtccctgcccctgctcaatcatctggtcatagaccgccgcgatgccgtacagtgtaccattgatcgcggtagcaatgctttgctcccatgcttccatggcaattgcgtgttcgctgtaataggcaagcggcattgtgccggcatcattgaccagcacatcaatgcgtccgtaggtgtccacggcgaacttcgccatggcattgacctgatctttcacacgaacatcggtcttgatgtaggaagcctcgccgccgctttcacggatctcctgcgtaatttcccggagcaattcctcacgccgcgcggccagaacgacctttccgcccaactcggcggccttctttgcggtctctttgccgaaaccgctggaagcgccggtgatgacaatgaccttgtcttttatgtagttttcggttctatagctgttcatcgaaacacctcctaatcaaatgacaaaggattcgcctgaagcgcgcacggtcagatcaccgatgctgacaccccaaggctgattgatggcataaataatattgtccgccaagacctgtggatcaggatcgttgtaggtcatgctgttgatgtcatggaaatcgggacgcagcggagcctcttctacccagttgctgaggatttcaagggggcctgccactgcgggcatcattgccatctgatcgaccacgctgctggaaaggttggtcttcataaagccggtgggcttaatggtcgtgaccttgattttgccctgacactcgctgcgcagagattccgccagatactgcacgcccatctttgcgacctgatacacgcctgcgcccgcaacggggaagttggcgtagatggaggagacattaatcacctgtccctgtccctgcttgatcatctggtcatagacggcggagatgccgaaaatagtgcccttgatgctgatgtcgatgcactgttcccatttgtccagcgcctgctcatgctcactgaaaaaggccagcggcatcgtcccggcgttgttaacaagcacatcgatcctgccgtaggtatctaccgcgaatttagccattgcgaaaacatcgtcctttttcgccacgtctgttacgatgtagctggcctcaccgcccgccgccttgatctccgccacggtctccttcagcttctcttcgctgcgtgccgccagaacgatcttgccgcccatctctgcggctcgctttgcagtcagcttgccgaagccgctggaggcgccggtgataataatgaccttgccttccacgtagtttttctgaatgtaattgctcttgtatgtctccaattcaattacctcctgtctgattgatttgttgtgcgtcatgactcacacgtttgatgtgttaattttaaaacaaacatggggcaaaatacattcacaatcttccacttttctgtattagttcataattatccttttttctgaatttaattctcccgttttgagccgttatcaaatcgttcatttcttgtatttctgcaaaaactgtgttaaaattttattatgctaacagaaactgggggggtaccgtgaaagctctgccatcaacaaaagagagatttgcattggctttgagggaattgcttgagagcaactcctttgagagtatttctgtcggggatatcgtggggctctccggtcttagcagcaggacgttttacaatcactttcgggataaaaacgagttgcttgcctatctctatcggataactgtcgagcctctgtggtatacggatgggaagcgaaactctctcgaaacgttttttacttgctgcaaggacaactttctttataacggcaccctcaagggcttcggaaacgctctatcctattacgggcagaatgacctgcgctccgaaatagaaaacaagggcgttgaggatcttgtaaggctgctgaaatggaaccattttccgggtgcgataacgccggaattgagagaagtgctccgtttcttcatgtgtggtattacgcgctattttgaaaagtattatctggattccaaaaccattcaggtcgactggctgtataccttctggatcaactgtgtcccagcctatttggctgaatatctagtaaaagagccggaataaatcttttccgcaaaacttatgatacctcggtacatgagatatcgagatatattgagagagacaaaaagaaatctgttttttcctcatgaatgcgtttcacggtgaaacgcattcttttgaccgtaaaacgccatatctcacggtgccagtccggcagcaggataataagggcctatcgtcaacagcgcatggtagagcgctgtcagccgataagcccttattttctttctgtatgtagttgtcgatcccggtgaatcccgcacataagccacatgcccagagtaggtctgcatttttggcgtggggctcataaaccatcaaaaaggaagcgcattgtcgactttaatcaaggaatcgattccagactaattacagaagccaacatataaagcaagcggaggccatcgatctccgcttgttcgttacccatatacaatctcctgtgaatatttacgacagcccctatccatacccgcagtataccggcccaaagaggatcacttccctgtgaaggcatttcagagtcagcgtttttcgccctcttttgccgccttctcgatgctgcgaatggtctgcaaatattcctcctccacgggagaaagattctgcacctgatatttcctgtattccgcctttgcctgctccatcgcctgcgtgtggcttacggttcccccgtcggtaagcagggcttctccggtggaggcaaggatgcggtccaggttctctacataatcgctcatgcacatgggccggcggcgcatcgcctgaatttccgcaaagtcaaaatatccggaaacgagattgttcagtatcttcagttcgtccgcagagagatagttctttgcaacagcaatatccttcgccgtgggaaaatccccggaaaatgcggtaagccccataaatggcttttcggcatcggctcgctcaaaaatcacctctgcggcggtatggccatgggcggcatagtgcagcttgttctgcaccattttgaaaaaagccaccgactcggcgcttttggggtcatagtccacgctagtagcgtagaggtcgaggacctgacggtacatcaccttttcggaggaacggatgtcccggatgcggtcaagaagctccttccaatagctgccgccgccgagattcttcaggcgctcatcatccatggcgaagcccttgatcatgtactccttcaagcgctcggtagcccagcggcggaactgcgttgcaatggaggacctgatgcgatagcccagagagatgatcatgtccaggttataatatagtctttcgcgctccacattgcgatttccctcgcggcgaacttgtcggaatttccgacaggttgaactttcgtccagctcaccttcggaatagatgtttttgatgtgctcaaccacatttgcatgggaagattggaaaagctcctccatctgtgcctgtgtcagccagacagtttcatcctgaaaccggacatcaatttttgtctcgccgctttcagactggtaaatgatgatatcgcccttgttttcatcgttgaggaaattactgctcatttttgttccctcccggcttttcggtggcttcagcaaacgctcggcttattgttattatagtatcacagaatcggcgttttttcaacagacgccaagggaatgatgcccctgtgcctctttttgagaaaacaagggaaaatgtccgcatcaatctctccatttctgcgcctcccaaagcatatcgatatgccggcgggattttcggtttgtgttgttgtaatcgtctgagcagagccagtcgatgagatagcatttggggatcatgtacttctgcagcagcgacagcgccttcagcttccccacgcgaatccattggcagacggtgcgtcggttatagcctgtgaagtccacggcggcggccacatccatcacatccggcagcgcagccagcttgctctcatagtagcgccggagcttcttctcgtccttggcgcacggcggttggatgcgaattttatagggccgaactatttcgcctccgtatttgtaccagttcttcggcgctatgtatttttccgggttgacctcacggtcgttcataaaagcgatcacatcgctctttttgatggcgtagcagcgggttttcttgccggtgaaggtgtggggaatcaggttgaattggagaagatagagagccgtccgtttgctgatgtgacaggcgatccgcatctgctccttgctcataatctctgggtatcttttgaattccttggcgtcgtatttcataacgaagactcctttctgtgtttcggtccgaaagggtgcttcgtgtgatttgttttgagccggtttttcttgcatttatccgggaggccgctcgcaaagccataccggacaagggctttcttcttgcgtattttcttgccagcgtgcaaaaagctggtcgttttggggcatttctcatttcaatttgaactcaggtttttctgatatggagctggtcaataccggtcggcgcgtccaaaatccgttgcagcacaagggctttcgccgtttccaaagctgccgtcaccgaccacagcagacacggaaatgccaagtgcgaacaagactcgaaatcatgtttccactttggaagtccaaactgcc

SEQ ID NO: 13981 - DNA, 6082 bp, Unknown
  gut microbiota DNA sequence
ccggtttcgtaattcgatatggtctgccgcgtcgtgtgcacggtctgcgccagatcgtcctgcgtcagcttccggcgcacgcgggcgcggcggatgttggctccaatgtcgcgcatggtgttcacctcgcccaaagcataccatgcgcgggcgcgatttgtcacgcaaagaacctttgcgcgcgcaaaaaaccggcagaagcgaacttctgccggtcgtgtttgtgcagttttactgtccgcggttttgcagcgcggtcaggtaggggttgaagcggcgctcggtctcgagcgtggagcaatccatgtggccggggtagacctcgtaatcgccgggcagagccgcgatcttggccagcgactgcagctcgacctccatgctgccgccggcgaaatccgtgcggccgcacgaaccggcgaagagcgtgtcgccggtgaagagcgcgtcgccgcagatgagcgtcacgccgccgggcgtgtggccgggcgtttccatgacgcggaaggtcagattgccgaccttgacctcgtcgccctccttataaaagatcgtgccctcgggcggggtgaacgtgtagctgtcgaaggcgacggccgtgcctgcgtcgagcgcgttcatgtacacgggcgcaccggtctcctcgtgcacggcgtagacggcaccggtgtggtcgtagtggccgtgcgtgagcaggatggcgcggcaggtgaggtggttgtcctcgaggtagtagaggatggtgttagactcgtcgccggggtcgatgacggcgcactcgagcgtggtctcgtccgtgacgatgtagcagttggtcatgaggtgcccgacgggcagacatttgatgagcatggggtggcctcctttataaatgatcggtatcgagcaggatggtgacagggccgtcgttgacggacgcaactttcatgtccgcgccgaacacgcccgtgcgcaccgggaagccgcgggcctcgcagcccgcgatcacgcgctcgtagagcggcacggcggtctccggccgggcggcggccgtgaagccggggcggcgggagcggcagtcggcaaagagggtgaactggctcacgatgagcagctctgccccggcgtcggcggggctgacgttcattttgccattggcgtcctcaaagacgcgcaggccgcagatgcggtcgacgatgtggtcggcctcggccgccgtatcggacacgtgcacgcccagcaggacaaggaagcccctgccgatgcggctgtattcggcgccgtcgatcgtgacggacgcctcggtaacgcgggtgacgacggctctcatgctttgccctcctgtttggccttcttttcctgttccgcctgcagctcggcggtgtgcgcggcggcttttgcggggtcggacgcgccgctgcgcgagatgcggatgacgccgcggatggcgctcaggcggctgatgatcgtgcgcagctcagccaggtcgtgcacctcgacggtgatcgtgatggtcgagcggccgctgtccacgtcgcgcgcggtgagcgtgcgcaccttggcgttgagcgtgttgagcgccgtggccacgtccatgacgaggcccgagcgctgcgcgctgagcagcatgagcgtcgtgccgtaggaatcggtggtgcgctcggcccagctcacgcggatccagcggccggcagtctccggattgtcgcggctggcgagatagttttcgcagtccgtgcggtggatggacacgcccgcgccgcgcgtgatgaagccgatgatgccgtcgccgggcaccggcgtgcagcagcgggagaatttgatgaggcagttgtccagcccctcgacgaggatgccgtgcacggcgtggcgcggacgcttgttgcggcgctcggccgcctcgttgatgcggtcgatggcgtttttctggttggccttctggttgcgcaggatctcgtcgcggatgcggttgacggtgcgcgtggcggtcacgccgccgtagccgatggcggcgtacagatcgtcgagcgaggtgaaggccagccgcttgaggatcagtggcaggatctcgtcgcccatgatgtcggccggggcgatgccgttggcgcgcagctcgcgctcaaactgctccttgccgtggacgatgttctcctcgcggcgctcttttttgaaccactgcttgatcttcgtgcgcgcggcgccgctcttggcgaggttcagccagtcgcggctcgggccgggcgcgtttttcgacgtgcggatgtcgacaatgtcgccgttttgcagcacgtagtcaaagttcacgatgcggccgttgaccgtcgcgccgaccatgctgttgccgatcgcggagtggatgctgtaggcaaagtcgatcggcgtcgcgccggcgggcagattgatgacatcgcccttcggcgagaacacgaacacctcgtcggcgaacatatccaccttcaggttgtggaaaaagtcctgcgcgtcagactcctgctgcgtctcgagcaggcggcggatccaggcgaacttctcttcgtcgccgggcttcgtgccctcgccgctgccggtcttgtatttccagtgtgccgcaacgccgtactccgccgtcatgtgcatctcccaggtgcggatctgcacctcgaacgggatgccctccgagccgatgaccgtcgtgtgcacactctggtacatgttcggtttcggcgtgctgatgtagtccttgaagcggccgggcagcggcttatacatatcgtggatgatgccgagcacgttgtagcagtcggggatcgtgtccacgatgacgcgaaacgcgcacaggtcgaaaatgccgttgatgtcgagcttttgcgcgtacattttgcggtagatgctgtagatgtgcttgatgcggctcgagatcgtcgcgtgcacgccctctgcctccagacgctcgcggatctgcgtgcgcatctcgcccatgaatttttcgagcgtcggcatgcgctggtcgagcgcgtccgtgatggccttgtagcccgtggggtcgagatacagcagcgagaggtcttcgagctcccacttgatcttctgcatgccgaggcggtgcgcgatgggggcgtagatctccatcgtctcgagggacttgatgcgctgcttttcctcactctggtaggccatcgtgcgcatgttgtgcaggcggtcggccatcttgatgaggatgacgcggatgtccttggccatggccaggagcatcttgcgcatgttctccatctgctgctcttcgacgctcgtgtactgcacgcgcgtgagtttcgtgacgccctcgacgatgtcggccaccgaggtgccgaagctgcgcgcaatgtcctcgtgcgtgagcgaggtgtcctcgatcgtgtcgtgcagcagcgcggcgatgatcgagtcctcgtcgagccccatctctgccgtgatgatggcggcggcgatgcagtgcgacacgtagggcgagccgtcgcggcgcttctggccggagtgggcccggtcggcgcactcgaaggccgcgcgcacgcggccaagatcggccgggatgccggcggcggtgatcttctgttccagctcctgataatgggcctcaaggtcgtagggcttcggggccacgttttcggcgcgggtcgcttcagacatagggacagctcctttcccgaacggaatggggatttcttgaaagtgtttcatagcaggctctggcggcgctcgcgcagggcctgcagcagcttcgacgcgccaaggtccaccttgccgctcgttggcagggggcgcaggcgcagcgtttcgccgtcaaagtccacggcggcgagacccatctcggccatgacgcgcaggcacacgcagaacttctccggccgcatgggcgcgcgcgcgggcagctcctcgagcgggaaggccaccggcgcgttcagccaccgccacgccacggcgaagtccgcgcgcaggggatagagatccaccgtgtcccacgcggggatgcactgatttttcagcagcgcgcggcacaggggcagcgggtcactcgggcgcacgtcggtcacgagcagctgcacgctgcggcggccgcggaattcgttgatctgcggcgtgaaggccacgtccacccactggccgatgcgcacgcccagctgcgccggggtgcacgagaagaagatgccggcataattatacccgcccttggcaaaatgcagccgcaggtgacggccgccgccgatgggcacggcgttgacgagccgtgcgcccgtgatgcacagcaggggcttggggttgccgttgccgcacggctcgagtgcgtcgagcgactcgatgcacggcatggtcagcaggtgcggatcgttcacgcgcaggtcgcacgtgagctccggcaggtcgtcggccgggttctggcggtaatactcgccgagcgcgcggcggaagcggtcgatgttctcgcgccggatcgtcagcccggctgccagcgcgtggccgccgaagccctcgagatactccgagcaggcgctcagggcattgtacaggttgaagccgccgaagctgcggcacgagcccttgccgcgctcgccgtcgcagcagatcatgatcgtcggcaggtggaactcttcactcaggcgcgaggcggcgatgccgatcacgccctggtgccacgagtcgctcgcaagcacgagcggcatccgcggcgggtagcggcacgcgatggccgaggcctcctcccagatctgctgttcgagcgcctgccgctcgcggttgagctggcagagcccggcggcgtagcggtcggcctcgccgtcgtcattcgtcagcagcagcagcgctgcaacggccgtcttgcccagtcggccggccgcgttgatgcgcggcgcgagcgtgaagccgatggtcgtggccgtgacggggcggccctccgcgccgcactcgtgcagcagcgcgcggatgcccggccgggggcgggcgttgatctgtgccagcccctgcgccacgagatagcggttctcgcccgtgaggggcatcacgtccgccaccgtgccgatggcgacgaggtcgccgtattcgcgcagcacccgctcgctgccgccctcgagcgcgcacaaaagcttatatgccacgcccacgcccgcgagcccgctgttcgggtactgcgagccggggcgcttcgggtcgacgacggccacggcgttcgggatcgcctgcccgctgcactcgtggtggtcggtgatgaccatgtcgatgccgcgctgcagggcatagttcgtctcgtcgatggcggtgatgccgcagtcaacggtgatgatgagcgtgatgtcgctcgtgcgctggagatttgtgatcgcgtccatgttcaggccgtagccctcttcgatgcggtcggggatgtacggatgcacgggcacgccctgccggcgcagatagtccgtgagcacgcacgtggatgtgatgccgtcgacgtcatagtcgccgaacacggccacgttttccctgcgctcgatggcggtgcggatgcgcgcgacggccttgtccatgtcctgcaggagcatggggtcgaacgcgctctggtcgccgccgctgagaaaggcgcgcgcctgcacggggtcagcgtacccgcgcagggccagcagcaccgccagcagcggcgagtagcccgcgcgcagcaatgcctccggcggctgcggcgccgtgtatggaatttgccagttgcggtatttcataagtgcaatgtgcctcgaatccaaaaacgatacctatagaaataatttattattttatcaaattttatggccggatgcaagaggcgcgtgtcgggtatcggcagctgccgcgcagatttgtcgaacagatcgggcaatgtgcgcgcggcggccgtccgggtttcctgtgcttgacaggtgttggctgcggtggtacgatgtgacggagcgtgccggcgtggcgaaacaggcagacgcaagggacttaaaatccctcggtggcagcaccgtgcgggttcgagccccgccgccggcaccagaaaatcggccgctctcgcacgagagcggccgattttcggttttccggacacgccggagcgcgcttgcgctgcaagcgcagttttccgcggcgtgcgctg

SEQ ID NO: 13982 - DNA, 1297 bp, Unknown
  gut microbiota DNA sequence
aggaaatgccgcctgtacagctctttcaattcatcggcggtgtagttcgtgccgaaccggcgattgatgaggccgcgcgtgatgccccaattccagccgtatttgtggaccaggcggtacatgacgctatagatttctgtctgcatgcgtatcccccccaagaacgcattaccttcagttccacccgggtgcagtgcgcccgggcggttgttattgcctgtgtgttaccaagcgtcaacgctcgtcagctcaaacgaagcgaactgttgcgtatcaagcgtcacggccgtgtatttccacgtagaatctggtgtcaggtcattgatattgtcgatggcagtaccgatctggttgccgtcctgatcgtacagcgcgaaggtgacacccacataggacagctgcttaccggacgtatttttgatcgcgccattgatgcactggctgccgtaattcgtgcggccttccgtgggttcggtggcggtctccaatttgttatagctgagcttggcaacctggtcagtgatttccggggattgcgtttcgacagttccggcagcgctggccggtttgtctttgtctccgctgccgccggcaatcgcggcaatcacgatgatcgcgcacagggcaagcaggacaattccaacaatcttcttggccttgctgggctgcttcctgccgcactgcgggcagactttcgctttgtcgtcgatttctgtcatgcaaaatttgcactttttcatagacactcttcctctcgtttttctcgccgtttccggcggtttacgacaattttatcattttatggtcgaaatgtctattctttcttctctgtacgataaaagggactgtgccacgccgccgccgctgcgcataataagcgcggaggcgatgaaaggtgaactatcaagactacaaggacgcgcgcgatgcatcgtggcacatcctgatcgactgcaaggtgacggagctgccggtcaggatcagcggcgtgtgccgtgcgctgggtgtgtccgtgcggcggtatacaccggccgagcgggacaataacgacggtatgtcgtccatcatcggcggcgcgccgacgatcttggtgtccgatctggcgatcccggcgcggcagcgctttacctgcgcgcacgaactggggcacatcatcctgggccatgtcggccggtatgatctcgtgtgccgcgagccagatccgggcgacaatcccatcgagcaggcggccaacgtgtttgcatctaggctgttagcgccagcgtgcgtgttgtggggctgcggcgtgcagtcggcg

SEQ ID NO: 13983 - DNA, 2326 bp, Unknown
  gut microbiota DNA sequence
gccatccagcatagcggcggtgtaggactgcgcaccggtgcgcaccttccaatacgccgcgtcacagatgccgataaacgcctgattggtcgcgccggccgttgtgcgcgtgatattggagatttcgccgaccgtgcgctcataggcgtccgtgatgatcgccatcatgccgggcgacaggccggaaaacgtcacggcggcggcttctgcatccgcctttgccgcctgaatgccgctgtccttgaagatctttgcgatctcctgctgcgatttgccggtgctttttgccaacgccttctggatttcgtccagattcccgccggcctgttccagcacccatgcctgccattcatccgtgccggtcagcagcttcttttcgccgcggccgaaccggatcatgaagcgttcgatcatgtcgcgcgcaatccattccgtcaggtcatccagcagcggcagcagggttttgccgatttcctgaaactgttccggggtgatcattcggtatcagggaacagccccggctttgctgtgttggcttctgcgtaggccgcttttgcgtcgtcttcgctgaatccttcgaaacgcaccagatacatccaccacggcaaaacgccgagctggcaaaggcttttcgtgttctgccggtcctcttcgtagctatacgtgatatccccaaaattgtacgccacggtatacgtgccatagggcgccagatcgtagatatcggcatagtcattcagcgcctgaatcaggtcgtccacggcggcctggatgcggtcgcggatgtccttgatgcgctggatggtgcggcggtcatcggcttccacctgcgtcgcagtggcaaggccctgcttttcgttatagctgaaatatccttcggaaaagccacatttggttgacaggctttgcagcagcatattgatgccggtctggcgctcgccggttttcagcttgcggtcgatttcctgatagaaactttccgccgctgaaccggcaacgttttgcacatagcgcggtagccgcacggaaacattcttccgcccgggttcgcgcaacagccgatcatccacaagggcgatcgaccgggaatcctgaatttcgtccaccatggcagaccatgcaacatccagcccacgcagttccggcagggcgttggcgtagatggacataccgcaggcgccgccgtcgatgttgttggcatctggcatggtgcacacggcaaacagtggcgcggtatcatccagcacggcgtccggcaggatgcccacccaatccggcacttcatccagattcacacgggatgccgctgttttgcccttcgccagccggaacgcgcggttggaaaccacataatgcgtcccttcgtagcggtgatattcagccttgacgtaataataatccggcgttgccttcgtgtcatacagcacgacgccgatcacacgcttgcggttgtccacagccgtgatcgtaaattccggcggcgtgtacagaccgatgctgtccggcgtgggtttcagcaggaacataccggcggcgcagccaacgtccaccatgtcacgcaggaacggaatcagttcttcgttcagacgttcctgcagccagtccgcgcgagcagagcctgacagttcgacgctgacgcccatcgtcgcaagacgcgcagcttcgccggtcactgcctttgcaaaattgatggtgcgatcctgatcgtttgcccacggcggggtgcacatccagatctgcatccacaggtcttccgcttcgcgcatttccggcgttaccagcggcgcaatgtggaattcttcgcggatctgctttttcacgctgtccagcgggatattgattttcacaggcagccaacctccttgaacacttcgcacattttcggaaactgcgaagcaatccagtccacgtatgtttcgtcatggccgtattccggatgcgtaaagttttcggacagcccgctttcaaacagaaatgcatgaatgatctcatgacgcataacttttttctgatagacgctaaagtctttcaggtcgcagtctttggccttttttgaaataacaatggtctttaccgttttgtcgcagtaaccatcgcatttttcaagcattgcatcttcggccgccgtggcttcaatgatttcgtattccgtccccaaaatatttacagtcatgcacttgcccccctgcgcatcgtcagcggttccagtgcgtaccgcgtggcgtcgatgctatggttattcacgtccgggtatccggtgacgacgttgccgtcccggtcccgctcgtattcatactccgaaaattcctttgccgcattcgggcag

SEQ ID NO: 13984 - DNA, 9671 bp, Unknown
  gut microbiota DNA sequence
tatgtataaaaatatgcgatacaatagcagcagcggtgcacctgttgcacactcagggacgaatatcacgggcttgctcccggtcaaaaagggtgatgtcgtgcgtattcgatggaaagggaacactgatgtgtcatatcaatctatcaagtttttcaagtctgaccgaacccaagtcaaagtcggatatacatctttggccaatatcgaaaaaggccaagcagggcctgttataaactttaatgctgccaatggagttgccgattttgagtttaccagctcaaatggcgcagcctatttttcaatcgtgctctacgacacgctggaaaatgtaattgttactacaaacgaagaaatcatataagcctcaaaagagcctcttgttgattttacaggatgccctacagcatcggattgatgagatgcagagatgaaggaggtaacagctgatggaatttgtttcttgcgatccgtcaaattaccgcgccgggcgcacgcagccggtgcggtacattgtgatgcactacacggcaaacaacggcgacactgcgcgcaacaactgcgattactaccaccgcgtgggcggcctgcaggccagcgcgcactatttttgcgacgagtatggcgcgatgcagtccgtgctcgagtgcgacacggcgtggcactgcggcgcgcgggcgtactggcaccccgagtgccgcaatgccaacagcatcggcatcgagatgtgcagccgcaagcgcgccgacggcagctactacatcctgccggagaccgtggcaaacgccgcgaccttggcaaaaggcatcatgcagcgctatggcatcgacacggagcacgttgtgcggcactacgacgtgacgggcaagcgctgccccatgccgtgggtggacgacccggcgcagtggacggcatttctggccacgctgatgccggaacacccgaacgaagaggaggaaggacccatgacacgatacaacaaaatcgacgacatgcccgcgtgggcgcgcagcgatgcgcagcggctcatcgaccgcggcgcactgcggggcaatgaacgcggcgagctggatctctcgccggacatgctgcgcacgctgatcgtgtgccagcggatggtcgatcaggcaaaggagacataaatggaccgactcacaacgatcaaagcggccgcctgcacggcggccgcagcgctgacggccttctggggctggacgggctggctggcggcggcatggtttctggccatgctgctcgactatgccaccggcagcgccgccgccctgcgcgccggaacgtggagcagccgcgccgcccgcgagggcctatggcacaaggcgggcagcgtggcgggcgtgctcgtggcggcgctgctggactttgccctgcgcgtgctgctcggcagcgtgccggggctgggcatcgactacgacgtgctgctgtgcccgctcgtgacggcgtggtatctgctgacggagctgggcagcatcgccgaaaacgcgggcgcgctcggcgcgccgatgccgcagtttctcatgcgggcgatcgccgccctgcgcgccggcatttccgaccgcggcggcggagacggggacggaggcggcgcggcatgacggacttttccccgctgaatttcccgctgccggagcgcaccggcgccgaggggctcgacgcgcgcgtgacggcgctggaggagacgatcgtccggctgctggaggcgctgcagtacacactgacgaacctcgggcgcgagaacttcaaccccgccgcgctcgaacggctgcgcgccgagctgcgcagcgggcagaccacgaaccagtaaggaggcaggcaatgcatctacccacatttccccgcgccatgcccgtgacgcggcgcgtacagaccgactttcgcggctacgaccaccggccgggctgcccggagggcggcatctacgagatgacgaacggctcggcggccgacgcgccgctgttttccacgcggccgggccgcacgctgacatatccgaccggcggcggcagcgcgaacggactgttcgccgtcgacggcggactgctctggtgcacgggccagacgctgtattttaacggcacgcccgtcgacggctgcacgctcgtcaacgggccgaaggtgttcgccgagctcggcggcacggtgctcatctggccggacaaggtctggtaccggccggatatgggcacgttcggcagcgccgagccgagctggagcggcacggtggcgctccagcgctcggacgacagcagcggcgcgcgcgccgattccgtcgccgccagcggcatcgacacgccctttcgcgtgggcgacgccgtgacgttcagcggcttttccacgccagaggacaacggcacctacatcatccgcgccatcgcgggcgcggtgctcgtgttcgaccccgacacgttctctgccgtcggagcggtcgagcacatcacggtcacgcggcgcatgcccatggcgctgcacgcatgcacatacgccaaccgcatctgggcctgcgcgcaggacaccgtctggtgcacaaagctcggcgacccgctgagctggtactggtacgaagcggacgaaaacggcacggtcgccacggcggcatggagcgtggacgtcggcacgccgggcaacttttccggctgcgcggcgacgggcagcggcgtggtgtttctcaagccggacgggctctggcggctctacggcacgaagccggacaacttccagctcatcgcctcggcggcgctcggcacggagaaaaactccggccgctcgctcgtgacggcggcggagacgctctactacctctcccccgccgggccggcgcgcacctccggcggacggccggtgcgcatcggcgacgcgctcgggcgcacgctcacggccggcgcggcgggcacggacggcacgcgctggtatctctcggcgcacgatccgcaaaacgcctggcacctgttcgtatacgacacgcgcaacggcctgtggagccgcgaggacgcatttcacgcatccgggttcgcccggcacgacggcgcgctctacgcgcaggatccgagcggcgtctggcgcttcggcacgggcagcacggcgcagctggagagcatgctggagacgggcgatttcgtcagcggcagcccggactgcaagcgcctgctgcgcgtgcagctgcggctggaggcggacgcaggcgcaagtgtcacggcggcggtgcagtatgactccgacggcgtgtggcacacgctggcgaccgtggcggcaggcgcgaagcgctccgtcacgctgccggtgctgccgcgccggtgcgaccactttcgcctgcggctgacgggcacgggggcgtggcggctgctgtcgctcgcgcgcacggagaccgccgccggaccgcagcactgaagaaaggagaccttatggccacaaaatacaaatacgacaaggacaccgactacgccgcgctcatggagcgggcggcgcagcgcggcgacaacgcggccgccgcgatctatgagcagcagcgcaacgcgaagatccgcggcgagggcatgaccgatgtgacgcagtcgaacgactacgcgcagtatctgccgctcgaggacgtgccggactacgacgacacgcaccgccgccaggcagagtccctgctgaccgagcgcgacacgaccggacagcgcgcgcgcatcgaccagatgctcgacgcgctgctcggcgaggaattcgactacgacccggcatcggacaagctctacgccgcctaccgccagcagtatgagcggcaggcggatctcgcatcggccaacgccctcggcgcggcggccgcgctgacgggcggacgggcctcgacggcggccgtggcggcggcgcagcaggcgggcggatactaccgcgcgatgctcgcgggcaagctgccggagctggcgcagctcgcctacgagcgctacaacggcgagcgcaagacgcgcctgagcgcgatcgacgcgatgctcgacgcggccgacagccgcgatggcgtgacgaaggcgcagatcgccgcgctgctcgacatggacgacgcggactacgaccgcgcggacagcaagctgcagcagcaggccaaagacgcggccgaccgcaaggccgccgccgacaagaaggccaaggaggaaaaggccgcgcaggaagcggcggacaaggccgcgcgcagtgaggcgcggcggcagatcacgctcatcctgcgcaacggcggcaccgtacccaacgacctctgggagcagagcggctacagcgccgtgacgatcgcggccatgctgcgcgggcggaagggttaagcgttatgtaaacttagcgccggtttcgctgcaatcagtcgctgtcgtgcctttcaccgaaaaatagttatgtaaactgtgcgaaggaaagaagtcccggaagcgaaaacgcttccgggacttttgcgtgctgtgtctgcgctcaggccgtggcctgcttatagcgcatgaggatggttgcgacctgcgcgcgcgtggtgctgccgccgggttcgagatagtccgtcttgtcgtgcggaaggcccttgataaggccgttgccgacggcccaggccatcgcgtcgcgggcataggccgacacgctgccggcgtcggggtagtcggcgagcgaggcggcgttaccggtggcgtccggcgcgtacttggccgtgtaccggtacaggatggcggcgagctgctcgcgcgtgatctggccgctggggtcaaacgtcgtggcgctcgtgccgttgacgatgcccgtgagcttcgcccacaagatggcgttggtataccactggccgcgcggcacatcgtcaaacggagcgcggagcttggccagctcatagccctcgacgaccttcggctcgccctggatgcggtagaggatgcacacgagctgtgcgcgcgtgcacgtgccgctcgggtcgacagtcgtggccgaaaggccgttgatatagccgctgtagatgcagtaatccagccccgcgtgcgcccagttgtccggcgcgggcatatcgcggaaggcgtagcccgggcaggtcggcccgccggggcagacagacggcaaaccggtagcaggaatggtttctgcctttgtctctccacagacggaacaagtataaactcgaaccccggatgttgttgcagtcggcttaataacgacctctcctgcattcatcttatggccaaacgccgccacttcattgcggtgttctacagctccgcattttgcacatgtatacaggtcataaccatcttccgtgcaagttgcaggagcacgctttgtcagctgccaagtatgcacatgcacaccggtcgccggaatcgtctccgttttggtatccccgcacacagtacaggtataggtgcggacacctgccatatcttctgtcggcttcgttgtcactttcccgctgttccatttgtgtcccagcggttctgaagcgtcatatcgctgtgtcgtgccgcaggcactacatgtgcacaggatataaccgcccgtcgtgcaagtggccggaatctccttggcaacaaacgtatgctcacccgttgcagggattgtctccgtcttcgtcgcgccgcagtccgtgcaagtataggtgcggacaccagcatgaatgcagtccggtttcgtggtcacgatgccggaatcccaggtatggtcccgcagcttcgggatgtcctcgcccacgcgcgtgttgcagcgcgcgcagatgtgatagcggtagccggtggtcgtgtacgtcggctcctgcgcgacgacccactcgccccagtcgtggccgagggcggggatgacatcgtcatagtccttgccgcaggtcgggcacgtgcccttgtagtggccgggctcggtgcaggtcggctccgtgcgcacgtcggcatagctgtagtcatggcccttggcggggatgacctcgtcgatctgcacgccgcagcgcgcgcacgtgccgacgacgcggccgggcttcgtgcaggtggccgggcgcaggtcgcaacggctcaggtcatggccgagcgcggcgatcttctcggtgcgggtcgcgccgcaggccgagcacttgtaaaacaccgtgccctgctcggtgcaggaggccgggaaggtctgcgtcttgacccaggtgtggtcggtggcggcgacataggtgtcgtccacgggggcataggtgcagcccttcaccgtgcaggcgtggtgcgtgtagccctgcttggtgcaggtgggggcgacgaccgtgtcggcgaactgggcgatgtgatcgccgtgccagagaccggtcttgtagccctgccacgtgccgtcgtccttgagctcggcggcccaggtgtagctgccctgcgggtaatagaccacgcagtcgcgcgggaaggagctgttggtgtccgccgcgccggtgatggtcttggcgggggcgtttttgaagatggcgcgcttgagctgcgtgacctttgcgatctgggtcaggcccgcagcaatatcatccgcgtgctcttcgttcccatccggatcgtccggggcgagaatcccgttgaggacagccttgatggcgagctgcagcgcggcgtccacactggtgaaggcgcgggcctgaatcgtgtcgatcttgtcgccgaagtaggcttcctcgagcagctcgcagccggcaaaggcgcagcggtcgatctgcgcgacgcggttggagaggtcgacggacttcatgtggttatcgccggcaaacgcggccacaccgatggtgagcttctgatcgccggggctgaaggtgagctcctccatataataatcgcacaggaaggcgtagtcgccgatgctcgtgacctgcgaggggatgttgagcttcttgtggtggttgacgaacgcgaacgcgcccttgccgatcgtctgcaggttcgacggcaggccgagcgtcgtgtcctcctgaccgaggatgcggtcccacgcgaaggcccacgggccgatatacgtcaggcagttcggcaggcgcagctcggcaagcatggtgcagctgtaaaacgcatgatcctcgatgcgcttgaggcggctgcaggcgcccgcgcgcacgaaggtgagcgtgtcgcagccgtagaaggcgtactgatcgatgagctcgagcttgcgcggcatgttgatggccgagaggtactcgtcggtataaaacgcatggtcgccgatggtggtgatgccgtcgtcgaggaacatgcacgtcaggtactggcagtccttgaaggcgcggtcgccgacgttcgtgacgccggtgaacgactgttttttcccatcccactcctcggtggtcgcaccggcgatgtaggccagagccagatactcctcgccgaggttttccacgacggtcgtgccgagcttctgccccttgtcgttatactccgtgacctccacgttgcccatccacggggctttctgacccttgaccgcgtagtccgccatcgggccgtcgccgaagatgtacacgccgtaatactgcgcgtcctcgcgatagtcgtggatctgccagacctgctgcaggaaggggttgtcctgcacgaccgtggggttcgtgacctcgtaaattttataatgtacgctggcctcgttcccggcggggccgcagtcgccgtgggcgacttcgttgccgaagagctttttgatctgatccggctgcttgatgaagtcctcgaacgcacccgcgatcgtgcccgcctgcgccggcggggcgcacacgctcagcaatccggccgcgagcacaaagcacagcagcagcgacaacactcgttttttcatatggttcctccctccgaaatggacattccggtaacaatgtctacacggccagtatacaggacgtaccccgcttttgcaacgggtcgtgcgcgcatgggcgcgaaaaaatgcacattttgtttacacaaatgcaacaaaatgtaacgctcaaaacgttttttcggcgatccccattgcacgctttcccaggcatatggtatattttcgacagataggtattacggttgtacacatacatcacaacaaaggaggacaaaggatgaaaaagcgcgtgctctcgctggcgctgtgtctcgttctggtcgtggggctgttctccggcctgaccgtgaacgcatcggcaagcagactcgacgatctgaaaaaggagatcgccgagaagctcatcaaggagaagatcgagcagttcaaggaggagtttgagattccggatctcgacacggatgccattctcagcagctttgcgaccgcggccacagagggcgacttcggtgtgaacaactgcctgcactgggaggtctccacgggcgtgctcagcggcaagacgctgaccatctccggcaccggcgccatgcccgactttgattttcccaacggcaatcttgcgccgtggtggaactatgaggcgctgggtatgctcacgagcttcggcaactttaagctggagggcgagctgaagaaggtcgtcatcaaagacggcgtcacgaacgtgagcgactacgcgctgttcttcctgccggccgccacgcaggtcacgctgccggagagcgtgacgcgcatcggccgctacggcatcgccatgtgctccaagctcacgggcatgtccatccccaagggcgtggccgggatcggcgacttcggtctcgcgggcaacgggctgaccgccatcacgctgcccgacgggctgcaaagcctcggccgcggcgcgttcgactcctgcgccagcctcacgaacaccactctgcccgccgccatcacggccgtgcccggcaagtgctttgccgactgcacgaagctgctgaacgtcaaatacgccggcacggtgaccgccatcggcgatctcgcgtttgaaagctgcaaggcgctcaccgcagcacccatccccgagaccgtgaccgccatcgacaaggccgccttcaccggctgcaccgcgctgacggatgtcaccatccccgcgggcgtgagcaccatccccgaggactgcttccgcggctgcaccgcgctggccgacatcgacctgcccggcacggtgacgcacgtcggccacaacgccttcaccggctgcaccgcgcttaaggacgtgcgctgctatggcgcggccccggcggtcgagccgggcaactcggaagcgcacagctttgagcccgccaccgtcaccatccactacaaccccgccatgaactggacgctcgacgcggacggcaagtggcagggctacgccgtcagcgacaagggtgcgtgcctgcacaccgactacggcacgacggagcgcaccgtgcccgccacctgcggcaaggccggccgcgtcgacaccatctgctccaactgcggtgaggtcgtctcgaccagagagctcccgcccaccggcgcgcacgtctggggcaacggcgttgtgaccaccgcgccgaccgagaccacgcccggcgtgcgcacctacacctgcaccgtctgcggcgatatccgcgaggagaccatccccgccacgggcgcgcacgactaccagttcaccaaaaacgtcgccccgacgtgcacggacggcggctatgacctctacacctgcagcggctgcggcgcgaccgaaaagcgcaacctgaccgacgcggccggccacaagtgggacggcggcaccgtgaccaccgccccgaccgagaccacccccggcgtgcgcacct

SEQ ID NO: 13985 - DNA, 874 bp, Unknown
  gut microbiota DNA sequence
aaggattcattgaggaggtgaggacatgtacaccatgaagacgctggccgccgttggcgtgatctgttgctttgcgggcttccttgtatgccttgcgatcttcaatcatatctgcaatgactgcctgaaatccacgttcgagcgggagcgggcaaccgagaagatgtatacagatgcactcgagcggctgtcaggtaaccagcggaatgatgatggatgcagcgagtgacactatggcaacgattttcgagaacgtagcatctttttcggcctttctggcttgctcttgcgcggtaacagcctgctgtcttgcgatttccgcgcgctcggatgcagcgtcagcgattcggcggagctccgcaatctggttggcaacagcttgggcctcgttggctttttgctcccgctcctgtttgaggcgagcgagttcgagccggccggcgtcggtgatgttcagaaagtcaatgttctcaccgaaagctctcacaaaatgcggttcatgtgtccagagagcgcgagcggctgcttcgatgtctgttgccgattccccggtttcaagctggaagtcattcagattcaaactgccgcactgcgagctcaagcgcgagagtatttcatattgcaattcaagaatatccataaaaattcctccttcgctgtgattctaccacgtgcgaggaggaacaggcaagaaaaggagggaggtacatatgaaagcggaagatcctatggcaatgatgcgtgaagcgcaccgcgagttatccgcaagttaccagcaagttgctgcaaacaaaaaccatccgcaagactttgcagatggttttgcatgaaatttgttcgattgattgattggaggtgaggacatggattctat

SEQ ID NO: 13986 - DNA, 819 bp, Unknown
  gut microbiota DNA sequence
gcgggcgcactgccaaaaagaaaaggcggactgcacaaagtgctgcctgcgccttttctgctacacgccgccatgtgaaatgacggacggcatgatggaggatgttatttcgtttgctgccagtcagcatagccacacggaaagtcaaactcatttatgccattgcagtgacggtcggtcgatgccgtgcccatgtgaactggacatgagcaccgcactagggtacgaacaccgtcgatgacctcgtaatcctcgagaatttgaacattccgcttgattttgtggcagtgatagagacgcatttcgtattccatcacacgcttcggtttcggttcctgcatttgctttgcctcccttcgagccgattctatcatatccgagcgggaaaacaagggcattcattattcattcgattggaggtgaggacatggagaacatcgtgagtatcctgtccggactgggtgttgaaatcccgcaggagctggttcccgctttgcataaggaaatcgcggagaactacaagacggtcgcggagtttcagaagctccgcaagcagctcgaccggttgaaaagcgggctgccggacacggccgcaagctattccaagctgatgatcgcgagcaacggaaggcagagcgcggtactgctcgacggcgttatgatcggcgccggcgttggcggaatacgccttgacgtgaaggacggcgtatcgaagctgagtattaccggcattgatgtggagcgattccgtgccggaaccgaagcggacttcgagcgcttttgcaccggatcgtcaggggacgaactgggtggagaatg

SEQ ID NO: 13987 - DNA, 525 bp, Unknown
  gut microbiota DNA sequence
gttttcagcggttatctccgtttgacaacacttttgacaactttacgttgcgttttacgtaccggttgaccttgttgtgaacctgctgtttgcgcttgtcctccaggtcggtgtagatgtcctgcgtcattgcgacggttgagtgcccgagcaagtattgcgcgtccttgacgtcgatattcgcactgtgcagcatggaggcgtatgcgtgccggagctggtgtgcggtcgattggatgccgtggctctgctggtattttttcaggccggattccaactccgtttttgtcggcaagccgtccgggaagaagatgaatgtctccgggtcatcatagtgcggcagaatctcgatgacgttatccggcaggtctaggtagcgcacgccggcttcggtcttgggggctttgagaacaggctttcgtgtgtcagaatatgcaacggcacgcgcgacgcgtgcagtccgcgtatcgagatcaatatctttttgcttcagtgcagcggcttctccgcggcgcgctcccgtgt

SEQ ID NO: 13988 - DNA, 2939 bp, Unknown
  gut microbiota DNA sequence
gtttgaattcaatgaacccatacccgattatgagcttctttccgatgaggatatagaggctcttttttaattcaattcaaggaggatgaacctatgaagaacaccaaaaaggcctcaaacaagctgcccgtgcccggcaaggtcagaaagggcgttcgtttctactgcgccgctgtgctgtcagtcgctcttgtgctcggctgctccgtcccggcctttgccgccaatgacccaatcgccgtcgtgaacaacctgagcgatttcattttcggtctgatccgtgcggtcgggctgatcctgctcggctggggcatcgtgcaggtgggactttcgttccagtcccacgaccccagccagcgcagcaacggctttctcacccttgcgggcggcatcgtcatcacctttgccaaagaaattctcaacctaatcacgggctgaaaggaggccgcaaatggaaaagtgcgagtgttatatccactctctgaaacagggagaaacccatgtgcttggtgaggcgacgatcctcaaacgcatcggggacaacgattaccttgccgaatacaacggtgtgaagtgccacgccatattcaatccctttgccgggcgctactttgtagacgatgtgtacggcgtgattcgcagttcgcccgaccgggacagcagataaatgatacggtgcacggggcaggtcacttcggcctgcccctatttgccggaaaggaggaagctgtgaagaaatacagcattatttacgcagacccgccttggcggtacaaggtctattctaaaaaggggcttggccgctcagccgaatcccactacccgacaatggaactggaagatatacgggcgctgccggtcggcacgctggccgccgatgactgtgtattgtttctatggacaacgatcccgctgctgcacgactgcttttcggtcatgcgtgcatggggcttttcgtataagacggtggctttcgtatggatcaagcagaaccgcaagtccgacagtctgttttggggcatgggacactggacgagagccaatgcggagttctgtatgcttgccaccaaaggacaccccaaacgccgctcggccggtgtgcatcaagtcatcctctcccacattgaggaacacagcaagaagccagaagaagcgcggcggcgcatcgtcgagctgatgggcgatctgccccgcattgaactgttcgcccgtcagaaagcggacggatgggatgtttggggcaacgaggttgcctgtgatgttgcgctgacgggaggtgagccgaatgtcggataactgggtcgtacagaatctcgaaaacgcactcgaaacttggaacgaaaagctggcggagatatggcagctcattacgcagtcaccggaacagttcaagggcggcacgatctggaatgtgattgtcggcatccacggtgcggtgcaggccatcggccttgcgctgcttgttttgttctttgtggtgggtgtgatgaaaacctgcggcagctttgcggagctgaagcggccggagcacgccctgaaagtgttcatccgctttgccctcgccaaagccgccgtcacatacggcttagaactgatgaccgctctgttcaacatcgtgcaggggctgatctccaccatcatgaacgccgcaggttttggcgcggcgcaggaaaccgtgctgcccgccgaaatcgtgaccgccgtggaggactgcggcttttttgaaagcatcccattgtgggcagtgaccttgatcggcgggctgttcattacggtcttgtcgtttatcatgatcatgactgtgtacggcagatttttcaagctctatctctacacggccattgcaccggtcccgctctcggcctttgcgggcgagccgtcgcagaacatcggcaagagctttatcaagagttatgctgccgtgtgcttggagggcgcgatcatcgtgcttgcctgcatcatcttctcgctgtttgcatccagcccgcccgtcgccgatcccgatgcggcggcggtgacacaggtgtggtcgtatgtgggcgagttggttttcaatatgctggtgctcgtcggcgcagtcaaaatggcagaccgtgttgtcagagaaatgatgggactgtaaggaggaagaattttggaagtgaaaatcaatcgagagatccgcaactatacggaatccatgtttttcgggctgtccatgcggcagttcgttttttctgtcttggcgatcctcgtcgccgtggggctgtactttctgctgaaaccatacttcgggacggaaaccgtcagttggatgtgtattctcggtgccgcaccctttgcggcgctgggctttatcacttaccacggtatgaccgccgagcaattcctctgggcgtggctgcgctcggagctgttagagccgaaagagctttgctttgaagcatcgaacctctactatgaagcgcttaaagaaaaattggagggcggaaaatcatgatcaagacgctgaaaaacctgctgaaacaggacaaggagcggtacaccgtgccccgcaaggtgcaggatgtgatccccgtccgccgcatctggaaggacggcatttttcaggtgggcagccgcttttccaagacctatcagtttaccgacatcaactaccttgtggcaagccgtgaggacaaggagcagatgttccttgcctattcggagctgctgaacagtctggattccggggcgacgacgaaaatcaccatcaacaaccgcagactgaaccgggcaaatttcgagcagtcgatcttgatgcccatgcggggcgatgcttgcgatgtgtaccgcagggaatacaatcaaatgctgcttgacaaggctaccggtgccaacggcatcattcaggagaaatatatcacggtgtcggtctggaagaaggacatcgaagaagcccgcacctactttgcccggat

SEQ ID NO: 13989 - DNA, 8569 bp, Unknown
  gut microbiota DNA sequence
ccgtggcatctatagtgttgcgatgttccacacctcaaaggctcgcaaacccttgatacgactgggtttgcgggcttttctttatgttatgtgtgcttatgtactgtccctcctacatcatcagatttgccatttacgggctgattttaggagggacattggagggacataaagcatcatgaggagggatatacgcccaaaatcgcattggcagatgcaatcttcgagttgaaattcaagtgcgtgtaaatgtttgaggtggtcgaaatatcactgtgccccaaccattcctgaatttctttcaggctgacaccgtttgcatacaacagacttgcgcagctatgacgaagatcgtgaaagcggatcttccgcataccgttcttttgcaggatcagcgggaaatgctgtgtgatatagccgggcttcacgagttcaccgatttcattgacatagatataatcagcaaacttcctgcaataagattttccgcacagctttcggttcagctcctgttccgctttcaagcggtgcagcaattcctcaaacggcggaacaagcggcagactgcggtagctggcctttgtctttgttctgtccttttgaatgatcttgctcttgccgtctattgtcgcctgcgtaacggtgtgccgaatcgtaatggtctttttcttgaagtcgatggcgtcccatttcaggcctaccgcctcgcttcggcgcaaaccgtaaaatgcaccgaggatcacgccaagctcaatgggatcaccacggacaacttcaaaaagatggttcagctcatcctcctcatagaagctgccaacgaacttttccttcttgggccgttcaatccggtctgccggattcgagtcaatcaggccgagtttgaaagcgtgctgcaaggctttacgaatattggcgtgacggtgtatgaccgtattggcagaaacacctcgcaccgtcaattcgtaggtgtagtagtcctgtatgtgcttgggtgtaacatcctgcaatgcaagaccggggtggtgttcctcaaagtacgggatgattttgcttttgattcccatggaatacgcgccataggtggtttcctccacattcttttttgtcatttccagccagtcgagcaggaacgcagtaaaaagaatcgtgccaatgggggctttacccgtactgcgttcgattgctcttgcttccagctctgcttccttggcggcacgagcctcagaaagcatcttttcggcacgctttttgtttccctttaccgtcagacctgtagacttgggcggcgtgtgccgtttgccgtattcgtccacatagttcagtaccatatgatagtacccgtttttctctcgcagatgtcctgctaccataataagacctcctttgattggtacagcgctgatccatctgccattgacagcaatattgtagcagatagaagtacatcggccaaatgtgcaaacgaggttttacgcagtagatttttctatcaagtccaagtattccaaaatgttgagcttcgggattcgatagcggcgaccaacaataaagctcttgatcttgccggactttaaaagccgataggcagttttatcgcagatgccgccgagcatttcacacatttgctcaacattgactacatcgggatattcagcaaataacagtttgtaggctgtctgtgattccataggccgcctccttaccgttttttcggcaaagttcatagtcataccctttccgctgattacagtaggtgcaagtgtcttttgccgtttggtgcgggtcaatcctgcgcaaataataagcacccgtgccgtagaaattgtcggcgcaggtgctgcaaaggcagagaatcagttttttcgggacgctttcaatcagaccgatgctgactgccagcgcatgattgatgccgcaaatgtgcttttcggacagatgcccaatgaagttgcccaagcggcgcttatcgacggtgcgcagctgttccagcaggacgatagagggcagctccaagccgtcctcggcgtcgatgtagtagtgggtaggaagtttggctttcacgccggttttgcttgtaatggaagcgataatgaccgtggggctgtgtttgttcccgacattattctgaatgatcacgacgggacggtagccctcctgctcagagccgatgccccggcccagatcagcgtaatacatatcgccgcgcaaatatgtgtggttcattctgtgatgacctcctttgtgtatttaggcgtttccgcctatgtagaggtcaagcggcagaacagaatggaggtcggtgagagataaaacattctctgtttcgtctgacccgtcccgccgcttgaccgtagtattttgaagaaaatctatttgtcctcgacaccccgatttcctattgggaagtcatcaagcggccgatggctgtcggctccacggggatttcaccctcacgaggttctctcatgaccgcccccattgcctgcgacggcttcacggtcgaaatgccgcttatcacgctcggactgtggctggacgggagtatcgttagccctattgccggtcgtcgccggggcgggagccacccgcccgtgatagccgactgtatatcgctccccgcaatgcggattgtggcgcagccgctaatgtggctcatgctttcgcaatggcaataggaatgtgcttgatgaatgggtattcggttgtcaaaggccatccctgcttgccgaaaaggaaaacaggcagagagttttcgtacctctccacctgtttcctcacttaaaggctatttttcaaccacctattccaaaaaaatttttcaatcttttttcggcggccgcaaccgattttgcaacggcctgaaaagtgcatccctccattcctgcgatctgctcataggtcaagccttgaaaatagtagaggatcaacctccgcttttgtatttcgggcagttcggagatcgctctatgtaactgcgcatattccatgctctgtaaagcgctttcttcgaccgtcgccggacgatacacggcccggtcatacaacgatgcctccgtaagctccgattgctcatagtggcgatccacttcgttcagataggagaggtcgtccagctcaaaggaatcaaacagcgcaaatacggcagcattgatctcaagatgatgccgatgtctctgtccgtccgaaaaggtcagccagtggcggccgtccccggtcgtgccgatggtatagggattgtatttgtccttccttcgtttcggatggtttccatccatgatattttcctccgtttcgatttgaattttgaaaatccaaatcgtgcggaggactgcggcagcctacgctgcagaccgaaaagcgcagacataggaaaatgcatctgcagaaagcgaaggcctgcaaaacaagtgagtataatctatatggggtggctgtttttactacatatttcattgctcggagagcgcttcttgaggaactcaccattcgcaacgcaggctatagaatgaaataaaacttgctactttttacagggaaggcggtttgcaaacaaataaacacaaaaaatccctccaatctaaaaaactcagattggagggatatacgcgcaatgaatcagcccgccaacattcgtttttttatttggcgggatatatgatttcgtatttgttgcatcgcttatttgccgatacttgtacagttgacatgaatggcgctgctataacaattacttactataatgaagctccattaacaaaagtcaagccaaaaaacaaaaaaaacatgcgaacatcttagcggagagaaggagatcatttttcatggtcatcttttggaattatattttctaataaattctatcaaaaatataaaaacagtattgacagaggaaaatgggtttgtcataattacaccaatacgtttcatttttttacagaaacgtacaaaattttactttgtgggggtaaagaaatatgaaagaaggcgtaaagaagagcatatccctcatccttgtgctgacgctgctggtgcagctgctgccggtggtggcattcggtgtcggcgacgaaacaaacgatctggacatcagtacagacagcgaaacggtgtccatgaaggacgacgatgcggagattgtcggcgaggaggacgcgctgcgcgaggaatccgtcaagcatttccggctgcgggacgggggctacatgctggtggagtacgagacggcagtgcactaccagacggcggacgggtcctgggaggagatcgacaacacgctgcagaaaaccggtcagcagtatgttgcccaggcgggagacatgacgcggaaatttgccgcgtcgctcgacagcggcttcctgttcgagacggcgtatcaggggcagagcgtgtcgatgtcgctggcgcggcgcagcagccgcgacgttgtggcggtcgcgccggacgttccggcagcggaggaaacggcagcccccgaagaaacagcggcaccggagaccgtcgaccagccgcaggaggcggagcagacggaggcagaccttccgcgagcgcccgcggaagccgcggcggagacggatgcgccgcagcaggagacggatgcgccgcagcaggagacggatgcgccgcagcaggagacggcagaggagctgccgctgctggacgacgcggcgtatacgttggtcacgtccacggcggcggccaggatggaaaacccgggggccaaaatgcgcaccttcagcaagctggcggagaaagacaagatccagccgcagaaaatccgctccagcgttgcgttcgacaacgtgatggacggtgtcagcctgctgtaccagaactatggatataacgtaaaagagagcatcatcattgacaaacagcaggagcagtatgcctactcgtttgtgctgaatatgcagggcctgacaccgacgctcgaggccgatggttccgtgctgctgcgcagcgccggcggcgaggtgatctacgagatcccggcgccgtctctggcggatgccaacaacgtcacatcggtggaggacgccgcctatcggctcgagcgcatccagggcggctatctgctgaccgtggaggcggatccggagtggatgaacgcgccggagcgcgcctatcccgtaacgctcgatccgacgatcctgctgcacaacaagggcaatgtcctgacgacgtatatccgttatgcagccccgaactccgttgccccgaatgcagcggatcagtattgcggttatattgcggatgattcatacggtgcgtgcgacatttacatgaaattgactctgcccaagatccccagcggttgtgttcctgtgcgggcagagattgcgctgtatcatgcaggcttcttcgcttccaaccactttggcggagctgcacccgacggaaatctaacagtggaagcacatatatgtgacggaacagtgtcaaatgtgtcaagcttgacatggaacgatgtatatgctggtgcattatctttcgatcgcacgatattggattaccaaaaggttagtaaaggcacactcggggaatatatcacatgggatatttcacgagcgattgttgaacgttccgtcactggttcagagacaatcggcctaatactcgagacaatggactgcatcgagaattaccgtgttgccaacctgatcggcagcggataccacgactacagcccgtattttgcggtgtactaccgcaacccggtcgggctggagagctactatacctatcaggaggcctcggcagcaaaagcgggtgatctctccatccagaatttcacgaaccagttcacgctggaccgcacggatgtctcgctctctctcgagccggcatcctacgcgctgcgccacatctacaacagcgcatattccggaagctggttttcggagaatggatcggtcggcctgcacacgcggaatttttcttccatgcgcatcggcatcggctggaagctctccgcgcagcagacggtggtggagtgtaaggtcggcgacaagacgtacctggtctataacgacgaggatggcaccgagcattacttcagcaaaacggcgaccaatacctatgaagatgaggacggcctcggcctgaagatcgtcaggtccaccagcggcggcaacacgatttacaccatgacggacatggacaagtaccgcacatgggtgttccacaacggctacctgatctccatcacggacaacaacagcaacacgatctattttgcctacaatgcggcatacggcagcggcagcgcgtggaagccggtcaaggacgcttccaccaaccggctcgtgcagatcgtcatggccattcacgacggcgcaagccagacggtcgcaaacctgacctacagcggcgaccggctctccagcgtgacggactacgccggccgcaccacgagctatacctacgactctgccggacacctgacgcaggtgacgtatgcggacggcacgtgtgcgtactaccagtacgatccggcgaacgggaccatgatcacgctgtatgacggcgaggcgcagtacggtctggagatctcgtacattttcaatttcggcgtccgatccacgttccgcgtgcgggaattcaccgctggcagcgcgccggcggacggtcagcggcagtatggcagtgccttccacgcctaccgcgacggtgtgcggcagacatcgtaccgtttctacggcccggatcatacccgagataccgcggacgacacgatcaccagctacattctcgactataccggcaagacgatctgcgcctttgacagcaacacggaccgctcggagctgctcggcgtcagcgccgccaactacacgagcaacaacggcaccagcaaaacgaacaaccgcctgaccggcgcagcggccatgggcacatcgtcgccgaacctgctgtccaactccggcctggagacctgcaccggcagcgccgcagacggctgggcgcagctgccgttcagcacgtccgcctcggcgggcacacagtccggaaaccggacgcacctcggcagcgcctcgatccagaccacggcgcccggcagcggcatgtatcacgaggccgcgctgcaggcaggcacgacctacaccttctccggctacgtgaacacgtgcgacatgaccgcgttcgattcgggcggcagcgtgtatcttgcggcgctcacggccgaccagatcgccgatctgtcgcaggcgagccgctcgccgtggaagagcgaacgggtgaactaccaaacggacgcctcggtcagccgcggctgggaaaaggtcagcgtgaccttcacgccggaaacgtcaggcacatactacatggccttcctgcaggacaaggcggacggcacggcctattgcgatgacctgctgctcgaaaagggcgaggccgcgtccgagatcaatctggtgcaaaacggcagattctcgcagctcgtcaacggaaaaccggacttctggaccgccaacaaatacacgatcaccaacgagcaccccaccggccagccgaacagcaagtccatgcacatcggcagcacgatgaacggctacgcgcgcacgcatcaggtcatcccgctcaatctcccggcagacgaggcgacgttcctgctctccggctggggcaaggcgacgagcgtcggcggcacggcccgcaagcacgtccacggctacgagcggtattttggccttgtcgcagagatcgcctataccgacggcacgaccgaaaaccagtacgtgagcttcaacggggactacgcgggctggcagtttgcatcgggcgtcatcgtgccgggcaagcgcgacgagtgggtcaaagagatcacggtgcgctgcgcctatgactacaacgccaacgaagcatatttcacggacatcagcctcgtgctcgaaccggcggagacctacagctacgacagcaagggcaaccccgtcgcggcgacggacggcagcgccaaaacggcgagcgagtacttcacggactcccagcgtctcaagagctataccacgcccggcggcgcaaagcacacgctgtggtacgacgcaagcaacaacctgcaggaggatacgctggccggcctgacgaattacacctaccacaacggttccggcagccccacgacgagcatgacgcgcaaggggtacagcggggactatctcaagtcccaaaacgtctacgacagcacgcgccgcttccgcacgcaggccgtggacgtcaacggcatcacaacggggtacgcatacgacaccggcgctgcgcgcctgtacaggacgacggcggccaacggcacgcagcaggattaccgctactgcaccggcagcgaccgcaccgccctcacgtacatcaacggtgtcgcctccatccgctatacctacgaccgcgcgcagctgagcgacctcatccgcaaagggtatctgggctcgacgggcttctggcagcactacctgctgggctacgacaccttcggcaacatgacgcgcgtgcaggtctgcgcctcgagcgcggagcagacggggtacacctcccccgtcaccctcgcgtcgtatacatatgagggcaacgtcaa

SEQ ID NO: 13990 - DNA, 6929 bp, Unknown
  gut microbiota DNA sequence
aactatgatgccttcggcaacatgacgcgcgtgcaggtctgcgcctcgagcgcggagcagacggggtacacctcccccgtcaccctcgcgtcgtatacatatgagggcaacgtcaataacggccggctggccacgatgacctacggcaacggcgacagtgtcagctacacctatgacgcgtttgacaggcagcgcaccgccgcgtataatgacggtacaacctaccactacgactacagcggcgacaacgaccttgcgcggcagtatgccacggacggcagcggcgcggtcacggagcagtacagctaccagtacgacagcctcggccggctcatccattcgcgccagtcgacggccaacggcgcgctcatccagtccacgcagcatatgtacgatgccgccaaccgcatgacgtcgcagtcgtggcagttcggcacgggcctttaccggcagcagtattcctacaccggcgtcaaggccgacggcacgaccgacagctcggtcgacggcacgatcagcgccatcacgaccacgatcccgggccagctcgacgtcacgtctaagtacgagtacaacgacctgcgccagcttgagaaaaagacggtcactgtgcccaaccagaacaggggcacgaccacggtctacacccgcggctatacctactcggtcatcgcggaggataaggactgcaaccgcgtcggcacacggctggcgagcacggcctacacgttcggctcgagcagccgcagcttcgactatacctacgacgcggccggcaacatccagacggtcacgaccggcggcacgaatgtgcccgcggcagccgcctcgaagacgtatacctacgacgcgcagggccaacttgcgaccgagaccaacggcggcgcgtcccgcgcctacgcctacgacacggtgggcaacatccgcagcgtcacgaccgacggcgcggtcataaagtccttcggctacacgaacccctcgtggcccgacctgctcacgagcgtgacagtcggcggcacgacgaaggacattctctacgaaggccagacccagacgagcggcatcccgtcctccggcaacccggtcacgtattacaacggcaaggattattccttcacgtggacgaagggccgccagctcacctccgcgacggtggacggcgagcaggtgtcctacacctacgacatgtccggcgtccgcagcaacaagcaggtcggcgatacgacctacacctacaccacgctctccggcaaggtcatgcggcagacttggggtgacaataacgccctcgagttcgtctatgacgacggcaaccagccgttcgccgtgatctacaagcacggccagacaacggagctctattactacgtcctcaacgcgcagggcgatgtgtccgccatcctcgattcgagcggcagactcgctgcgtcctacgactatgatgcttggggcaactgcacggtgtatgacagcagtgcgaaagtcctcaccgatcccaccagcatcgccaacctcaaccccctgcgctaccgcggctattactatgacgccgagaccggcttctactatctccagagccgctattatgacccggccatctgccggttcatcaacgcggacaccttcgctaccaccgacgccaacggcttcctcagcgccaatatgttcgcatattgcgagaacaatccgattatgcgggttgatgcggacggagagatatggaatgtcattgcgggtgctgtaatcggcgcaggccttgaagttttaggccaactgatgacaggcacgaaattcgctgatattaattggggcagcgttgcaatggaaggagctttgggcgctgtatcaagccttggcataccggctcgaataacaagcaagttgggcaaagttgcatttaccgcttttaaagatgtcgtaataccaaccacggttgaagtaaggagtcaaataaaaaccaataaacgtgtcaattacacaaaaactgcaattacggcttcgaaagcaagtataaattctgctgttactgctgggaccgatcgcttattaaagagcactagcagtcgaatggcaaaggctgtagttcattcgacacgtcaactgtttttcttcactttcgggctaataagcaagttttggaggtgactttatgaaagagttgatttttcagccttataaaagaggtgtaattagcggtggaattatatcagttatcctttgtgttgggctattcgcctatcttacatttgaagatggggagtgcccatcaaagaattcgttaatctttttgtgtgtatcttcagccgtagttgttcttgtttatgctgtaacagtgtttagtatagttagatcggctggatacagaaccaaaattgtagtcagccagcagggatttgcggttgtagaccccaagcgttcggaacctgtatttgtaccatggagcgagcagatctatctgtgtacttgcatggaaggagacgtctatagctatcattggattcatgatacgatactttgcttttccaatcaggacataagcggacagtggatagaaaggggccaaaccgtgaactaccggcagacgtttgaaacagatgccggacagccgtgggtcgttgcactgacttatggcagcaaggcgaaatgcaggaaagatgcagcacgcgtccgccagcacatggacggctgttcacaacaatcagagtaattctacatagtaagcgggcggtgcaacagcaccgcccgcgttttgtttctcttggtggggttgcgttcgcgccaagaaaaatgaacaaatgccatcatatatggttttttgtgctctttcttatctattccggaataccgtagcctagaatttcgtagtatcccaccggatattggcgctgtcggcagctgtcgccggaattgccctcgatggtgtagacaatgccgttttcgcatttttccacgatgccgacatgatcggactgcccgtcctgcggaccggataagcccttgttgtcccaatcgaagaaaatgatctgaccggcagacggctcaaagctgccgtcctgccattgtccacggtccttgaaccactgcaccccattgacacagcctgcgaacttcggaataacgccgctgtcgatatagccgcactcattcgcacaccaagatacaaagcaggcgcaccactccacacgggagttaaatccataccatgaccaatagggctgaccgcccacattgccgatctgcgacaaggccaccgtgacgatagcatcgtccccggagtaaatgccgtaaagggcggctgaccacatactacggttttcctcggcaagcaattcagagagctgctgccgctgatcggcgttgaagttgaaacggtctgccatttcttcggcggtcttgtggctgaccgtaatataaaggtaggtgtgtgtgaccgttgtaatggtttctacaatgttcccgtggccgtcatcggtttcggtgataatctttccgggctttctctcaatgtgagaagatatttcattcatcttccagaaaatatctttgaggatggctttcttggcatcgtccaccgtggcgacctcctgcggatcgttggggtcggtggtggttttcaccgcatacacggccagcacctccggccagacggcacgggagccggacatctccagctcatcataggtgagatttgcccttgcggtatcgatctgcgactgataatcggcgttaatttcctgcacagcctgccgcatagtttgccccgtgccgctgccctcgccggagaagaagatgccgaaacaagagccgacgatcagcccgatcaggcagactacgatgatgacggtgacagagacccatccaccggcggcgatagctgcggctaaggccttcgctttggcaattacggctttgacagcggtagtagtagccttgacagccgtcttccttgtggaactagcaaacgcctgcctactgcggctattcgctttgatggtgctatgcgctggatttttcggcaaacccgccgctctcgcctgaaaattcccttttgccttggagatgttttgcttggtgacctttacacccttgcggttagccttatccaccccgtatgcggcttcgtgagctgccgtttccaccccggtcaaagtgcggtcggcggcgtattcttcgggagaggattccgccgcaaagacgccgtgctccgccttgtccttggtgcggacataggcatccttcatccgctcagcggccaccgccgatttgtcgattgcctttaccgttcccttgaccacatcccgtatcttgatgtcaggcattgttgcccacctccgcagagggtacggcgatccgcttggcaacaacgactatgcgcccgtttttgcggctgtattcgcaggtagagagcgtgatcagcctgtcgccgtattccgccgttacgccggtgtcataaagagaaagtgccttgcattgggcgatataatcatcaaagtcctccgccgactccgcacgggtaaagtggtaatacttgaagccctgctcggaataggcgacggtcttgaacaccgccacgatctcatattcgccaaagccagatagcgtatcaaaatggatggtcttgtgctctctataaaagtcctcgttttcatacttgcagagatcggtaaacatcgtcccgttgttcatgtggtggccgtagatcacgcagttgtcgggcagcgcaatgtcgcagttttcctgtacatagggcacgccgtaatcgctgtactgtttgtcaaagccccgtttcagatagaaattcggctcgtccacggtctgcatcacgggatagtcgatgttcgtgccgggaacggagagccagcccacaaagtcactgttctgttcctgcaccgcccgatacttttcaaatgccgtcagctccggcaacggcttggtttccaccagtgcggcgacctgttcaaaggcttcggtggcctgttttccgtccgcatactgccgacagagcatgatgccggagaaaaggaaaagggcggcacatacggccgccccgatcatcagatatttgcttttcatatatggcctcctttaagatgcgtttccgctgccgaacacaccctcgccggggcgcgtcgtcatcaagcggtaaaggtcggtatctttgggaaaacggttgataaacggcacaagcgccgagccgtatttgatcagcccgcagcctgcgtcggcgttggtgacatagctcatttgctcgtcggagatgttcaggagcttcgagagcttggcacggtcggaaaacgcctgattgagcataaccacgaactcggagttggagagcatggtgctcgcctgcacggaatccagcaggtattccacattctgcgtgatggcggtgggatagccgttgcgcttacggaactgccgccatgcagagttgaagaaaatgccgctctgctcattttcaaaaacgacatgaaattcgtcgatgaagatgtgggtgcgcttgcccttcttccagttaagggtgacacggttgagaatggtgtcggtgatcaccagcagtcccgtcggcttcaactgctcgccaaggccgtgaatatcgaatacgacgatgcgcttgtcgagatcgacggtgctttcgtgaccgaaaatatccagtgagccggtggtgaacagctccagcgacaaggcgatctcctttgccttttcttcgggctgttccaacagcttgtttcgcaggtcgcagagcgcagcaggcttgcccgtccgctcggcgtcctgatacaccagcgccgtgcagcggtcgatgatggatttctgctgtgggccgacaccggccttgtcgatctgctccacaagggacatgatgaactgcgatttctccacaatggggttgttctcgccgtagccgtccaccatatacatggcgttcaaacgatctttgccgcctgccgccatatgaatgacggtcgccgtttccttgcccaaagccgccgccagcgcaccaaattcgttttcgggatcgcagatcagcacatcatcagtggtgtcgagaatgagaaaagcgatcaactccttggcgctgaacgatttgcccgaaccgggcacacccagcaggaacgccgactggttcagaagatttgctttgttgcacatgatgaggttgtgggaaatagcgttctctccgaagtaaataccgcccttgtcctgcacttcttgcaccttaaagggcataaacaccgcaaggctctcggtggtgagggtacggaacgcattgatcctccgtgtgccgatggggagaacagtgttcagcccgtcgaactgctggaatttcagcacggcgagctggcacatatgctttcgtgccacggcaagtaccgtttcggtgtcgctgtcgagctgttttttgtcgtcggcggtaatgaccatcgtaatgaccgccagcatcatccgttgatccctcgtggtaaggtcgtccagaaattccttgctctccttgcgttggagctccatatcataggggacgacggcggagaaattgttgttggcgttctgcctgcgctgccagttggtaatgttggtttcgataccgagcagacggttctccacctcccgcacggcttcgtcggtggggatcggcacaacatcgatcgacagcatcatatttcggttgaaatcggtcagctccgtgaccatgctgtctttgatatacgaagcgtagtctttcagaaacaagacccggcagcatttctcgcccagtttcaggaagccgctgcttttctccatagagtcggggcagatatagtccttgaaatcgtgccccttgcgcatcatatcctgcgggtcaaagtgaaaggccgcttcttcgccctgacggtagaagtcatggagcacccgcagcttttcggtggcgtccagctcggtgcacttgg

SEQ ID NO: 13991 - DNA, 105463 bp, Unknown
  gut microbiota DNA sequence
gagcggaaaaagtattcccgataagtttgggaccatcaggccgcaggttcgaaccctgtcactcggaccataagtccaccgtaattttgatagaattacggtggactttttctatgcccgaaaaccgcttgaaatcaggcttttcggctatttcggcacataagtgaaccccgctgcagagcaattctgcagcggggattcgtgcgttttatggggattgcagctttctgctctgctgtaatcgttaaacagccgagtagtcgttgacctactgggggtattcgttaaacagcagatttggttatttaccgctcaagctcctgccttactcgcatcgaactgctttgatgcggtagaaagcaagagccttctccggggtccaaaccgccgaaaaaggcataaagcaagggctttcgaggtcaaatactgacttcgaaagtccttgtttgctttatttggaacaactaaaaagttaaggttattccacaaacaactccggtgtattgaagcgaatgtctggaatttgctgcacaacttcgttgtctccacagttttccaaatcgtttttgacatgaacattcccttcaccatcaaccgtaaagtactgtgggtgtgccttgatgtaagttgcagattcacgagaaaaaccataccgctgcaattgaatggtgacttcattggtagtgccgtattcaacatactcataccaattattcctgttaagtgatttttcgccgtggacacgcttgtattcattggaaaagcgcaaaaagtaattagaaatgctaaataggattacattttctattacctccagcgtattggcaaatacaatatttctgtgttccaacgagtttttgtcgtaatactgcttcgtatacctgttgatccagaacttttcggggtgtctttcttggtattccacagctcgccgcattatatagtttaggcccttgccttccatccattgaaccaatatgactgcataccaacggagcttagtgtagtcaccatcctcatcgcattttccaagagtactgtactcataccgtttccaatcaaaaatatcgcccaatcggattagaaagccaaacacttcgtcaacgttgaagctgccattcggctccggcaatggataggcgaatgtggaatctgccgaaatagctgcacgcaattttcgagtttgatcgagcgaaatgtttatatcactatcgatgataggggtatactgagaaaaaatgttctttattttttcttcatcgccgtctttcatgtactttctgaattcttgttgaatcagactatcattatcatgcaggatatctttcagaagaataaggccaaactttcgcatcatgatgtattcttcttcgggttggtcgtcgttgtatttgtcaataaccgaactaccgcttaaaaggatttctattattcgctttttatgttttggcttcaaatcctgcaccaaagaaagatgttgatccggaatccctgatttcaatttatcaaggtatacgtcctgtttattatttcgggtctcatcgctgatcatgaatacattgccggagagattgtactgtattcgaccgactcggccaacgagatttctaaaatcaacgtccgtcatctgcgcacgtccgctgtaatagcttgtgataaacaggttatctgcaggtaaattaacaccttcgactaatgtgcttgtacagaacatcgccgtaatcttttcgtctttgaagagtttttcaatcctcatacgaatcgccgacggcaggtatcctatatgatatgcaataccttgctccaagagtcctgccaggaaatagtccctatgcacttggttgcgaacatctcgtgccaattctgcaagctccggatcgatctgcttttgggttccaccatcaatctgtttctgtaactctgcaaatgtaagtgcagcattgatggctttatccttactactaaaatacgcaatcattctgcttgtgcgttcgccactgtttttatagaacagccccatgagcggaatgacgccgtcttcgggattggcatttatggagcagatgtactccagagttttcagatggtcattatatatgtaaatctgcttcgttttcagatttacaagaaacttaaactgaaccaccggagagaatgctgaagcaatagcattttgcttatcgtattcaccagaagctaaaaggctcaaatactcctgtggattgggtatattgggtgacgcaaagataaacttaggttttgcagttcgtctgcttagttcatccacaactgaatagtaaaatggtgctctgctgttgcgccctgtcattttatgagcctcatctataaaaagataatccagcacgaaatccggtttgtcattaagcagataaagcaagcgttccggtgtcaggacaaaaacaaaattatgatcggggtgggtttctaaggccatatcattagcagaagaaaccacatgatactgattttcatccaacaagttttcgaggtcatttcgaatgatttcgcttcgcacttcgtttataagtgctttggtcgggacaatcagcgcataattcttctttttaccggccaatatctgttctttaataaacatacgcatgataaacgactttcccatagacgtgggcgctgagtaactaaagcacgcatcatccaaatgctcgtaaacctttcgctgttgctgaaagaacttcttttcaggagcggcaggaacagtaaggtacaagtcgctcaatgtagaaaacagttcatccatcacggtaggctcaacatactgtgattgcacgagttttcttcccataaagttccccgtgcttgtcaatacagacccagcataatagtgtacaacttcatcatctgggtacaaagtaagcaacatggtaataatctcatgcgcccaaattttgtgagaatcagccttttctacatgagttgatttcgaaagaaggtctgcaaatcgcaatgcgtcatccacattaacaccgcgcagttgtttaatgttggtaatttggagcaccgtaatcgcatagttgtaaaggatattcttataaagctcattcaggtaatcattttcgtctattccctggaagaggacatctccaagtcgcattttttcgtgctggttcatatcggagcccctcctctcaatacggcatccataatttgtgctttttcctgttcggcatcattgaatgggacaatatatacataaaacgagtgtcctgtcaatcctgctgcggaaatcttctctgagatataacctgcgtgctctctgatatcgcagagcattttttgctctgcaagagcctcaaaatcatcgccgcgcccggtagggttcaagcccaattgataccccaagaaaacaccgtatgccgtgtcatatgtttccggctttcctggttgcggaatgaggacatcactaagcagggcaacctcttcctggttgaagaactgatctaaaaccgttttctgtaccattaatatttcgcgactctcatgggagtcaatcttgctaattgtttcaaacgcacggtcgatagctgttttgacatcatccacaatattggatgcaccaaagaccatttgaaactttgtgttttggggcaaatcactcggtgatagtagatgaattcctttgcactcgctgcggaattgtgccatttccgtgtataattccacgcggctcataagtttgggcgctttcaatttctcctcaagaaacgcatatacaaggatttcatccagcatatttcctgttccctcggcagatgatccgccgttttcagccatgatgcgcatagcttcggatacggcagaatcgaggtcatcatttatacgataattctcaagctgtgctctggagaaaacataacgcgcaaggtttctacgcaaaaatacctgtaaattatctgtcgacaatctgtttccacgcattgcggtgtggaagaagcggatatgattagctttgggcagattgagtccctcggaatgctgaacctctacaaaaacgctgtccaaggttaatccactattttttattgtcgctgaaatagattcgctcattctttcggtcctccaatctgccgcatataattagttctcttttgaagctatatcagagttgggcgcttcataaggctttccgtccttgttgtaggtcagattaaatacaaggtcggataaccatttcttaaatgatggattgtcctgaaactgcttgaacagctccatattgtccgccataatcgaaaagatgacctgctgcagagcacgttcgctttccaagcgcgcactctgctcatcagagtttctcatggcattctgatatttttcgtccttagagaccatggccggtatctcaaggatctgccgccgcacgttatccgcatcattccaattgatgttaccaaacatatcattgaaattggagagaatgacagacaacaaatccatttcaggttcaacgatatgcccaacctttcccgccggtacgggagccacctccgtatcggtatcttccaggcgaatggacatgacctcacgcgcctcgttgcggtaactttcgaggtcgatcgtttcaagaatcccctgcgaaagatcgtcctctcgcggagacggcagctttggtatcagcaaattaagaaagatggacaaccgttcccagtctgcgttaccatacggcaaaatcgctccgagaaagccatatgtacgcacgaacgcctttgctgcgctcttaaatttaatctgatcatccgtgtcaaactgcttgtaaacggcagtacaggcatctaatgtgggatcaagtttgtcgcgatccgctccatccaggtacaaattgacaagccgctcgacatcttcgttggagaacacctggtattcctccattgttgcaaccaggtcgtatagcttgttcggatcggtttcgccggacagaatcgtggtgcggtaatatcgcgaaaatgattcctgaatcatctccggcttgtttgcaaagtccaatacgaaggtatcgtactttttcgggcagcagcggttcaagcgggagagcgtctgtaccgccttgatgtcataaagcaccttgtccacatacatggtgtggagtagcggctcatcaaagcccgtctgaaacatatccgcaactatgagaatgcgatatgggtcttttttgaactctttcggtatcttagcatccgggaagccgttcaatccggcagaggtgagcggcggttcctgaccttgatacttgttctcgccggaaaaggcgatgatcgttttatatggactgtgcctatccgcaaggcatttattgatggcgtaataatattcgatacagcgaggaatgctggaggtcacgaccatagcgcgagcctgcccgccgatttttcctttggcaatgacttgttcgtgaaaatgatctaccatcatagccgctttcttggcaatggtatagctgtcgctttccacaaagctgcgcagcttcttctgcgcccgcttcttatcgaacatcgggtcatcctcgacggtcttcatcagcttatagaagctgtcgataggcgtatagtattgcagcacatccagaatgaacccttcttggattgcctgtttcatcgtataaacatggaaaggtctgtgcttgatatcgtcgccgtcctgatacggaacgccgaaggtttccagcgttttattcttcggggttgcggtaaacgcaaagtagctggcattgttcagcagtttacgcccttccatcatggcgttgatcttatcctcgttatccatctcgtcatcagaagcaagccctgaaagtgcaaggttcatctgcgcagagtttcttccgctctgtccggaatgagcctcatcgatgataatggcgaaatggttatccttgtgttctgctccaatctgtggaacgatgtacgggaacttctcaatcgtggtcacgataatacgctttccatctgtaatggctttcgtgagatcgccggagtgctccgcccatgcgaccgtgttgccgacctgcatgaactgcttgatagtatcccgaatctgcttgtcgagaatccggcggtcggtgactacaataacggaatccagcatcgggcgaccgtcctgttcaagcccaatcagttgatgagcaagccaagcgatagagttggatttgccactgcctgcgctgtgctgaataagatacttttttccgacaccgtttgttttcacatcggcaagtagcttcgttacaacatcgagctgatggtagcgggggaaaatctgcttttcctttttctttttggtgtcctcgtccacctcgacaacgacctgcgcgtagttttctataatcagcgtcagcttttcctttgcaagaatatctttccaaaggtagtcagtcatgatgccattgggatttggtggatttcctgcaccatcattatatcccttgtcaaagggcagaaaccagctgtcttgtccggcaagtttcgtgcagaacttgacacgggcatcgtctacggcaaaatgcaccatgcagcgtttgaactggaacagcatctctctggaatcacggtcatccttgtactgctgaacggcatcatcaacattttgctttgtgatctgattcttgagctcaaatgtaataaccgggagaccattgataaatacgcacagatccaatgccagtttggctacatcctgtgaatagcggagttgtcgtgtaacgctgaaaatattcttttggaacagctccttcgcttttgcgttgccctcagagggggtcaggtaaaacatgatcaggtcggcagggtatactttgatgccgtttcgcagcacgtcaactatgccgcgcttagaaatctcgccctgtaagcggttgagaaactgtgcgtatttttgatgacttttccggatacccagcttctctaattgctccggttgcgtatcctgcaggaaccgaaaaagccgagtctcatctatggcgtattctttgttgtagtcggtgttggagccttcttcatatccgttgtgctcaacaagccagtttacgatcagcacttcaagtccgctttcctttgtgtttgtaaacatacatttcctcctctccgataaaatcagaacggcaattcggtatcaggttctataacctcaatatctgaaattttagcaataaagttgtttagtacaagagcctgagattgtggtgtcgatgctcggaaccagcccaaaaaattcctgacagtctcatttggaatattcactctattgttataacggtaaccacagtcaacaacactgccaattacatcggcatttttttgaatcaccgtttcaaacagattagttgtaagtgctttttccaatctggaaataaaaattgcacaatcggtattgaatcgtggttctgccatataagatgtcaaagactcataaattaaattggtaaactcctgatagatttccctgtcctcatcagatatttgcatatgaaggaaatcgtgctttcctatggcctcccgtatagcagcaaaacttgcaaagcgattttcaggctttttctccatcattttattcagaatgtcattgtaagagaaatctgtccgatcgcagcttttcgaattatcgattaacctccgaaacagttctgccagataaaacatatcagtaaggttggtatagataccatcataatattcctgcggcaaagtgtcagatgcagcacgattaatatctgtaacaaggctgtcagcgtcgccgtcatctacttttgaagcaatctttccaattccaaaatcaattactttcaccgttccgctcttatctacgagaatgtttccttcacgaatatcccggtgaatgattccgtgcgcttctatgtagcaaaacacatcgataagctgcagaaaaacatcatccaaagtggtttctgcaaacggggcaaagtaatcgctgataaagtcccctatgttttccccgtcaatgtactccataaggatatagcccgtgtaaatattttcataagcataatagttataaatacggacaatgtttctatggttgagtttgtagagaatcttgatttcatcaagaaaattcttatagaattgctccttaattccatcgtactctggttcatatttttttgcgacaaacagttcgtctataaacgggtcttggagtaataccgtctttccgaatgaaccaccgccgaggtcattattgaccataatgtaatccttctgctttacaaaaggaataacatctccgttttgtttagcaacagccatgtttaatcctcctgttcttcagtaccttcttcaccatcgtcctcattatccgcatcggcatcttcatccacaaattcgtattcggggatttcgatgccacggacatcaatcttgccagtgacggtatcagcaataatcttgttcttatattcttcaagcacagcaacttcttccgtcaacttttcggttgcggcatcgtattggggcagtgcctgctttatatgtttgacaatggcaatctgctcatccgtaggcgggacaatgaatgggatctccttcattttatccatttgtaaatcccactgcccaacacgaatgccatcggacgcctgggcgaaaaaattcacataaaccttgctgcggatggcatagtgaaaatactccaaattctcaaaagcaatgtcgaagatgaagtaagcagggctgacgattccggtataatccgaaacgccataggatccttgccaagccttcatcttattcatcgcaaactgcccttttcgcacaactttatagccgcttaaatcatcaggaataaaattgtggttagcttccttatcctcgacatcacggagaatgacaccctgttcacggacaactgatagtagaggaaattccgggtgatttttctcgcttaccggatgtaaaatctgccgaagttttgtgacattccaatgggccggaatatctcccagccacttgacgccactatacttcgtgggcgcatctgctgtcagcccgcgagtgatcgcatggcttaccgttgaacgcttcagcgcatcaatcgctttgatttcctttttcttgatattgatcagcttattgatgtttgaaaccttccagtccagaaagcgcacaatctgatcctgctcctcacggggcggaacgggaacagatgtcctttttaatgcgggccaatatatatttcgttgaatcgaaccgacacttttcgagttaattagatactggtctaccatgatttgggaacgcagaaggtagtttgcatatctgctgttgagcatatcattcatgctcagaacaatgtatgcaggactaacaattcctgtatcaaatgatataccaacggagccccgccaagcctgctgattattcaggacaaaatcgccgcaatcaacacgctggtacttagacaaatccttacttgttacatttgtccttttttctgcctttgccgaaaatggaatcaccccaacatctaaataaacagaaagaagaggcaaatccacacaaccacatatggacttttctttcgcaagcgcatacatcggcaatacactccaatgacttggaaatgatttgttccacaaagatgcataggctgtatatgattgatatttgctcattgcacgccctccatgatgcaagccagcaatccgtcggtttcctgctcaagggtagacaaactactcaaaatatcactcatgtctcgtagctccacaggcttgtaaaaatacttcgtaaatctgatttcatagccgatctgggttttcttttcgtccgcccaggcatccgatgcataggtcagaacctcgtttttcataaatgcgtcaattccgccctcataggtgaacggaatattctccgtgtcgcgcagatcaacatccggttcaccctcgattggctgcgcggccgggtctttctccgtgataaaggggcgtacctttttcaatgcggcggctttcagcttggtagccttggcaaaggcggtccaatcatccaacggcgcagtttttgcggccttttcgatagccgcaatcacactgtcgtattcatccgactttttgaatgtgtttgtcggaatcggtctgtcggggtacacgcgcaggcgcagcggccgctccaccgtcacgctccaatagccgaagtcccagttgttcagtatcatgctgacttcgctctcctccattgcgaggaaaatgcggacgatctccttgcggatttcttcggtaaattcgcagtttttcttgcccatgttcttgcgcagtgccgacttcatcgccgttgcgtcgatgagctgaattttccccttgcggcgttcttctttcttattggaaagcacccaaatgaatgtgccgatgcccgtgttgtaaaacatattctccggcacggcgataatagcttccaccagatcgttctcgatcatataacggcgggcattgctctcgccgcttcccgcatcgcccgtgaagatggatgaaccgttatgtacctctgcaatgcggctgccgaggggcgtttctttcttcatctttgctacattgttcagcaggaagagaagctgaccgtcgctcgtgcgcgggatcattgtaagctgctcaccgccgtccagataagcattgaaacggctgtcgaggatttccttcttgccacccatcttttctgcatcggttttccagctcttgccataaggcggatttgagagcatgaagtcaaactgccgggtggcgttgccgtccaaggacagcgttgagccgtaactgatatgttctgcctggtcgccgtcacctttgagtaacatatccgctttgcagatggcataggtttccgggttgatctcctgcccaaaaaggtggatagaaacatttttgccgcgccgtgccgccagtgtcataagccgatcctgtgcaacggtgagcataccacccgttccgcaggccccatcatagcaggagtaagtagcgtccttgatctgatccgcaatcggcataaagataaggtctgccatcagctcaacaacatcacggggcgtccagtgttcgccggcttcctcgttgttctcctcgttgaacttacggatcagttcctcgaaaatcgtacccatgccgtggttgtccagaccgggatgcttgagaatggtctttttttcgtctttgtacaccgggttcggactgaggttaatatccgaagatataaatttttcaatgactgcaccgaggatatctgcctcgatcatggtgtcaatctgattgcggaacttgaacttctccagaatctcctgcacattcggagagaaaccgtcaagatatgcttcaaaatccgttttcaatgtctgcttcttcgcacggctggtaaggtcgcgcagacggaacggagacgcattgcaaaaagcctgtcctgctacattgcacagcgcaggccactggttatcgatacctgccgcgtccaactttttcttcatatccaggacagcctctttactgtcctccaaaagagcatccaaacgacggatgaccgtcatcggcagaatcacatcacggtatttaccgcgcacatacacatctcgcaggcaatcgtctgcgataccccatataaaactaactatttgattatgcacctgattgtccatatttcttcgtttcctttcgctctatagtgagccactattatcatatcaaattcgctgcacaataaaacggtcttagtcggcgttctctgctttatcgtcggctgcgccgccggagcgaatccaatcatctacctctgacagtttgaacttccacagcctgcccaccttgtacgcaggcatatttcttttagcgatccaggcaagaatcgtttctctgccaacgccgagatattcctgtacttctttaagggtagaccacttttcaatattcacattattttcagccacttgttttcctcctgaccttaagctttgaatgtaacactaatagtaaagtcgaatacgagtctgctgtctggaaagcaattatttccgttagaatcctgcatttcccacacgcagttataagagccttcaatgccacgggagtccgctcccgtggttatttttataaactcttgaggttttgtttccggaatgtctattgtgagcggtgcgaattgaggcttgatctcattttgattggtgcaaaccaattttcttccgctccacaggcatcggcctcgattctgtatgctccattgatgagtgaatttctgatagcatccgactgcgtgacacctgtcgtattgttctacccacagatcatcaccgtcataaaggcgctttggaatctcgtagcgagctacagcctcggatacaactgcattctcatatgcacttgcaacaatacagtcaacggtgtcatctttgctgcctataaaaaccgcaacctgtcgagccatcgcaatacttaatagctttttgtttttctccaaattcgcaggaatagcaaaggcatcgcacaatgcggccacaaactcatcttttatatgcttttcgtaatagtccgctattttagattcatcaaccggcttcggaaaatgtttcttcatattgctgttgagactcttagttgtgccactatagaccgccttcaaataatcatcggaatattcacgggtaattccagccgccctaaacagtcctttcaaatattgcgcctgtgacgagcaggaaaaccagttcagttgcccgacctcgcaaaactccgaaaataccattaattcaccgccttctaaaaagaaccatcaaaaagaaccaaagaaccttgagacccttcgccgcactatattccaaccacaaatttgcccaagtatcatataaatggcggttgggaaatgcctgcggagacggttccgaggattcaaaagtcctctaaaacgtttctaaatgattttcacatttcgttatagcatgaaaatatgaaaaaatcaacgctttcaaggtgttaattcacataaaccaacgataactcacttttaagagggggtcgccaacggcagagaggtatattcaccggccatgaatgatccagtgcctacttgccacaaaatcacagctttctgtctggattgggacgctgatatgaaaaggagggacaagcagtgacaaaatccgaacgtcgtaattggattatcaacattgagaacaccgctgctactgtcagcgcccaagttggtcaagcagtagttgattctgttttcaaaagatatggtgcacatagcgttgaagatttgaatccgagtgacctgcctgatgtctttagcgacctgtatgcaatcgaagccgacctcggctaaagcgaatcgtcctgagcaagacagaaaactgctcaccgtcggataccgcatcacttgatcgctgatggctcaacggtatccggcggcacaagtaaataatgtagctgccttttgagcgggtttgctgcagaccgaaacggaggtttccgtttggactgcggttggtttttcacacccattttgcggcagcgcccaaagtcctccgtttcgagaaatcaaaacggaggacttttttatgaaaatcaaatacgcattcttggacggaacagtgacggaggtcgaggtttctgacgaaatcggtgccgtcatcatcgccagccgcaaggcggagcacgcgcaggacgaacgccatcgctaccattgctactcctacgacgccatcgactacgagggcgaggagtacggtgcttgcgacgaatatgccgtagaggatgattcggcagaacagaccgctcgtatccgagaagccttctcgcatttgactgccacccagcagcgccggcttcgactgtacgcaaacggcaagaccctgcgggaaatcgctgccatcgaagaggccagctttcagtctgtttccgagtccatcgaagcaggcagaaaaaagtttttgaaaattttccgccagacaccctgacaaatccccgatttttctgggtacaccggaaggcaacaaaatataagccctccggaaaggacggtaaccccgtatgagacacaacttgaatatccgtgtttcagacaagcccagaaacggcggcgtagttgcttgcagaacggtcagcatccgcgagaaactcttcaccttgcttctgggtcccaagcagaaggtcatggtcgtggttcccggcaactcggtcgagtccattgccatcaccgaagttccgatgggaggtggcacacatgagtaaggtcaagctcctgctcgatgtggtcgaggatcttcgctcactggcggacagcgttcaggctgtggcagatgccatgctgcagaatgagccgactgtcgatgcagagccgaagacgcctgcacctgctccccaaaaggagctaacgctggaagaagtccgagcagtcctcggtgaaaagagccgagccggattcacgaccgagattcaggcgctccttaaaaagtacggtgctccgaagctctccggcatcgaccccaagcactacgaggtactgctcaaggatgtggaggtgctgaaagatgccccctaatcgtcacgcagtcctctcggcctcttcctcccaccgctggctccactgcaatccatccgcaaggttggaattggagtttgaggacagagaaacggaagccgcagccgaaggcaccgccgctcatgcgctggcggaacacaagctccgcaaggcgctgaagatgcgctccacccgcccggtcagcaagtacgactccgacgagatggagatgtacacggacagttacctggagttcgttctggaagccattgaggaagcccggcaggactgcccggaccccaaggtgctcattgagcagcggctcgacttctcctgctatgtgccggatggcttcggcaccggcgactgccttatcgtggcggacaaactcctccacattatcgatctgaagtacggccagggcgtgttggtgaatgccgaagagaatcctcagacgatgttgtacgccctcggtgcgctccgcatcttcgattgtctttacgacattgagacagtttctatgaccatctaccagccgcgccgagagaatgtcagcacctgggtcatttccgttgccgagcttcgggattgggcggaaaagacactgaaacccaaggccgagcttgccttcaaaggcgaaggtgaatactgccccggaagctggtgccaattctgcaaggcggcggtcaagtgccgagccagagccgatgccaagctccaacttgccaaatacgagtttgcccagccgcctctgctttccgatgcggagatcggcgacattctcggtaagctggatgacctcactaaatgggcaaatgaactcatggcctacgcccaggaagcagcggtcaaccacggaaaacagtggcccggctacaagctggtggagagccgcaccaatcgcaagtacaccgacgaggatgccgttgtcgctgctgcccgtgcggccgggtataccgacatcttcaagaagtccctcattcccatcaccgagatggagaagctcatgggcaaaaagacctttgccgaggtgctcggcggtctggtcgtcaaacccaaaggaaagccgacgctcgttcccgcatccgaccggcgtccggctattacgaccacgggtgcaaaacaagactttaccgactataaaggagaactgtaattatggctaacaagatgaattcgaccaaagttgtgaccggcgttgtccgcctgtcctacgcaaacgtgtgggagcctgtctctattaatggcagcaaccccaagtattccgtgtcactcattattccgaaatccgataagcagaccctcgacgccatcaacgccgccgtggacgctgccatcaaggagggcgtcgccaagttcggcgggaagatccccaacaaggcggctctgaagctcccgctccgtgacggcgataccgagcgtgacgatgaagcctacaagaacagcttcttcgtaaacgccaacagcaccaccgctccccagatcgtggaccgcagcgtccagccgatccttgatcgctccgaggtgtattccggctgctacgccagagtgtccgtcaacttctacgccttcaattccaacggtaaccgcggcatcgcctgtggtcttggcaacatccagaaggttcgtgacggtgagcctctcggcggcaagtcctctgcggctgacgatttcgccaccgacctggacgacgacttcctgtcctgagaaaggagtgcaacacaatggaactgattcagaacatcctggtaaccgtcctccttggcatctgggcctgcctcagcatcggcttcttcgtttggttggtgcagggcatcagcaatgaccacaagcgtgaaaagcgcgagaaggaacaggcttcccgtgacctgaaataccacgagaagcgcatgaaggaattgaagtaaccccagacggctctgtgggtggcagaaattgacctctgccacccgtattccgtaggaaggaatgcgtatgaaaacacttagcatcgatattgagaccttctcctccgagaacctcaccaaatgcggcgtgtaccgctatgccgaagccccggatttcgaggtactgcttttcggctactcagcagacggtgctccggtgaaggtcgtggatctggctgccggagaaaagattcctgctgatgtccgctctgcgctgaccgaccctgccgtgaccaaatgggcattcaatgcacaattcgagcgcgtgtgtctgtcccgctatcttggatacccaaccggacaatatctcaacccgtcctcctggcactgcacgatggtctgggcggcgacccttggactgccgctttcgctggaaggcgtcggtgccgtgctgggtctggaaaagcagaagctcaaagaaggcaaagacctcatccggtatttctgcactccggcaaaagcaagagacggttcgcccattcgacattatccgacagatgcgctggagaaatggtcgcttttcaaagcctacaaccttcgggatgtggaaacggaaatgtccattcagcagaagctctccaagttcccggtcacggagtcggagtggcgtaactacaccctcgaccagcagatcaacgaccggggcatcatgctcgaccgcaccctcgtcacccaggcgattcgctgtgatgaacgcttcaagcggacgcacatggagcaggctcgctccgtcaccggcttggataaccccaacagtccggtgcagctcaaggcgtggcttgccgaaaaaggcgtggaggcagattcactctccaaagccgctgtggcagatatgctcgaaaaggcggacggcgaggtggagcttgccctctcccttcgacaggaacttgcaaagagcagcgtcaagaaatacaccgccatgcagacggtagtcggctcggatgaccgggccagagggcttatccagttttatggtgccaaccgcaccggccgctatgccggtcgactcatccaggtgcagaacctgccgcagaaccatctgccggatctggacaccgcacgggcactggtccgcagcggcaatacggatgccgtggaaatgctctatgactccgtgccgctggtactgtccgagcttatccgcaccgcctttgtgccgaaacccggctgccgcttttatgtggcagacttctccgccatcgaggcgagggtcatcgcatggatcgctggggagcattggcggcaggaggtttttgcaaagggcggcgacatttactgcgcttccgcttcgcagatgttccatgtccccgtagaaaagcacggcgtgaacgggcatctgcggcagaaaggcaaaattgccgagctggctcttggctacggtggctccgtggatgcgctgaaagcaatgggcgcactgaactacggcttacaggaagaagaactgaaaccgctggtggatgcctggcgtctgtccaacccacatattacaaagttctggtgggatgtggacaaagcagcttccacctgcgtccgagagcgaactgccacagaaacacacggcattcgcttctattatcagagcggcatgatgttcgtggtgctgccctccggcagacggctcgtgtatgtaaaaccgaaaatgggcctgaaccgcttcggcaatgagtccgtgacctatgaaggtgtcggcgaacagaaaaagtggctgcggctggaaagctacggacccaagttcgtggagaacatcgtccaggcaacggcaagggacattcttgcggaagctatgctccggctgaatgctgccgggtaccgcatcgtcatgcacgtccacgatgaagcggtcatcgaagcaccgccggatacttctttggagaatatctgctccgtcatggggcaaacgcccgcttgggcatcggggctgctgctccgagcagatggctatgtctgcgatttttataagaaagactgaggtggcccaaatgggagtcaataaatttaattgcgaggggtattacgaccccactgcctacgaggcactgacgaagatcgagcaggaagccaaggcacttcgagccttccgtcctgtggtgtatatctgctctccgctggccggggatatgttgaagaaccaggagaacgcccgtacttactgccgcttcaccgtggaagccgggtgcgtacccatcgcaccgcacatctatttcacccaattcatgaatgacaatgaccgcagggagcgtgacttggcactgttcatggacatcgtcctactctccaaatgcgccgagctgtgggtgttcggagagaaaatcaccagcggcatgagcatcgagatcgagaaagcaaaacgaaaaggttagcttatccgttactttaccgaaaactgtgaggaggtacacagatgaagatcgcagtcggcaatagccgcatggataaaaagtggaagaaccaggatatctcctgggcggatctctgcgcccgctgcggcagcaccatccgcaccaccgaaacggtcgaagaataccgcaagctgaaaaaggggcagcaggacggcatcaaggatgtgggcggttttgtcggagggcatctccgggaaggtcgccgcaaaaacggcatggtgctgtgccgctctctgctcacgctggatatggactacggcaccccagatatctgggatgaaattacgctgttccacgatttcaagtgctgcgtctattccacccataaacacacgccggagcatccccgccttcgtctgctcattccgctgaagcgggaaatcagtgaggaggaatatccggcagtcgcccgcatggtggcaaaggagatcggcattgacctctttgacgataccacctacgaggcatcccggctcatgtattggccttccacctccgccaacggcgagtttttctacaaggtgcaggacggcgcagagcttgacccggatgaatacctttctcgttacgacgattggcacgatgcctccacctggccagtttccagccgccagtccgagttggtacagcacagcatcgcccagcaggccgacccgctgacaaagccgggtgtggtgggtgccttctgccgtgcctatactgtggaggaagccatcgacaccttcctctcggatgtatatgcgccgtctgctatgaacggtcgctacgactatatccccgccgattcctctgccggtgttatcgtctacgacggcaagttcgcatacagccaccatgccacagacccggtctgcggccggctgctgaacgcttttgacctggtgcgactgcaccgcttccgtgacctggacgataagtgcgccccggataccgcctcaggcaagctgccgtccttccatgcaatgtcggatttttccctcaaggacgagaaagtcaaagcggtctttgccgaggagcgcaaagtccaggcaagcgaggaattcaccgatgaggattggcagaaggcattggaactggataaggccgggaaagtgaaaaatacgctgcaaaacctcaccgtgatcctcatgaatgatccgcttctgaaaccgctggtgttcaatcagcttctggacggcatggagatcaagggcgatgtgccctggcggcacccctcgaaattctggcgggatgcggatgatgcccagcttatcagctatgtggattcccactacggcaccttttctgcaagaaactatgacattgccgtggcgaaggtcacggacgaccgctcctaccatcccattcgggagttcattgaaaatctgccggagtgggacaaggttccccgtgtggacacgctgctcatcgactacctcggcgcagacgataacgggtatgtccgagctgtcacccggaagaccctctgcgctgccatcaagcgtgtgctgtatcccggctgcaaatttgactccatgctggtgctgaacggtcctcagggtgtgggcaaaagtacccttattgccaagctggccggagagtggttttcggacagtctgaacctgggcgacaccaaggataagaccgctgccgagaagctgcaggggtactggatcttggagatcggcgaactggcgggactgaaaaaagccgaggtggagacgctgcgttcctttctctcccggcaaaacgatatttaccgtgcggcattcggcaagagagctacaccgcacctgcgccagtgcgtgttcttcggcacaaccaacgccgagtccggctatctgcgggacaccaccggaaaccgccgcttctggccggtcaagacgccgggtacgggcatcaagcactcctgggatctgaccccggagctcatctgccagatctgggcggaaacgctggtgtatgtgaaacagggcgagaagctatatctgagcgccgaattggaagccctgtcgaaggcagaacagcgggaggcaatggagtccgatgagcgtgaagggcttgtccgtctgtatctcgacacgctgctcccggagggctgggacggcatggacatcttcgagcgccgcaatttcctcaccggcagcgacttcggcgatacccaaaagcatggtacggtcaagcgcacccaggtgtccaacatggagatctggtgcgagtgcttcggcaaggaacgtgccaatatccgcagaacggacagcaacgagctgaccgccatccttgcccgtcttggctggaagcggctggacagcaaggtgcgtatcccgctttacggtccgcagtatgtttttgttcccaaggagtgttcctaatgaaaatgactgtacccgacatccttcggaacaggttccggggagaagcatatccgctcggcacatttatgggaacatctcatgggaacggcggcagccccataagtaccaaagaaaacaggcggtcttgttcctgtgttcctaacctttcttatatatcgaaagaagaaggaataaagagcaacaagcacgcaatacccgcatttgcgcacgtaaaggacttttcgggttttgagaacacaggaggccattatgcgtgagaaaacaatagaagcaaagctggtacagaccgttcgttcaatgggcggtcttgcactgaactttacaagtccaggtttcgatggagtgcctgaccgtctggtgctcctgcccggcggcaaaatcgccttcattgagttgaaagcaccgggcaaaacactccgccctctgcaagtaaggcgaaaaaggcagttagaagcactcggcttttcggtgtactgcatcgatagccccgatcagattggagagatactcagtgaaatacaaggcgcatgactaccaggcgtatgccacgaacttcatcctggagcatccaatctccgctgtattcctcgacatgggtcttggtaagagcatcatcacgctttccgccatcttcgacctttgcctcgacagttttctggttcgcaaggtgctggtcatcgctccgctgcgtgtcgccagagatacatggcctgcggaaatccacaagtgggatcatctgcatgggctgacctactcggtggctgtcggtacagaagcagagcgcaaggcggcactccggcagcgggtcagcgtgtacatcatcaaccgggagaatgtccagtggctcattgatgagagcggcatccctttcgactacgacatggtggtcatcgatgagctgtcctccttcaagagctatcaggcaaagcggttcagaactcttctgaaagtccgtcccggcatcaagcgcatcgtgggcctgaccggcacgccaagcagcaacggtcttatggatctctgggcagagttccgcatccttgatatgggcaagcggctcggtcggttcatcacccattaccgcaacaccttcttccgcccggataagcgcaacgggcaggtggtgttcagctacaagccgctgcccggtgcggaggaacaaatctacgatgccatctccgacatcaccatctccatgaaagccgtcgaccatttggatatgccggagtgcgttcataatgacgccattgtgatgctatccgaaacagagcgcaaagcctacgatgccatgaaacaagacctggttatctcgctgaaaggcgaagaaatcgacgccgggaacgccgcagcgcttgcgaataagctctcccaaatggcaaacggagcagtctacggagaggacaagcgtgtgtttcagatacacgaccgcaagttggatatgctggaggatctcatcgaagccgcaaatgggaaacccgtccttgtggcgtactggttcaagcacgacctggagcgcatctccgagcggctccacaaacgatacatcccgttcggtctgctggacgattccgacagcatccgcagatggaacagcggtgagctgcccgtggcactcatccacccggcttctgccggtcatgggctgaacctgcaggcaggcggctcgaccctcatctggtttgggctgacctggtcgctggagctttaccagcagaccaacgcccgactgtggcgacagggacagaccgccgataccgtggtcattcaccacattattgccaaagacaccatcgacgagcgcatcatgactgcgctccgcaaaaaagaaaagacccagaccgcactcatcgatgcggtcaaggccgatttggagggataaacgaatggaaaactgttatacgaaccttgcaaacgccattatcgtacaggcagcaaaggattacaccaaagcactgcgccgtctgaaaaagtttccgcatgacaaggaagcacgatacatcaagcaggactgtgagcgcttcttccgctccggttggtttgaggtgctgaccgacctgaacggcgaggtactgattcagagaatgaacgaggaggtgtatgccgtatgaccgcaaaggaatatctcagtcaggcttaccgcctcgaccagcgcatcaactccaacattgaggaaatcagccgccttcaggaaatggcctgcggcatctcgtccccgtcgtgggaagagaaagttcaaacctcccgccacacggatgcacctttcgtgcggtgtctggagaaaatcatggacttggaaaaggtcgtgaacagcgagattgacaccctcgttgatttgaaacggcagattcggtcgacggtggacaccgttacgagtgtcaacgagcagatggttctgcgctaccgctacatccacaacatgacctgggagcagattggcggtgagctgaatgcggacgaaagcaccatccgcagatggcacaaagcagccctttctgcggtgaagctgcccaccgctcccattaaaatttgaaagacgccggaaatacccagctttgtccgtagatgcccacctcaccattatggtatgatagaatcagcgaaaaagaatcaaggatagcctcatgggagcaataccgtggggcttttctcatgcccaaggaggtgaaacgatgccgaagaaaccgctgcgaccatgctcccaccctggctgccccaacctctgtgacggacagttctgtgagcagcaccgcacggaggaacgccgcaaatatgataaatacgagcgcagttccgatgtcaaccgcaagtacggcagagcatggaagcgtatccgtgaccgctatgcggcggagcatcccctctgcgagatgtgtctcaaggaaggtcggctgactccggtgcaggaagttcaccacattctgcccgtttccaaaggcggcactcacgcaagagagaacctcatgagtctgtgccagtcttgccacacgaagatacaccatgaccttggtgacagataaaaagaggtcacccagaaggatgacctcttatggcggagcgggtaggaatcgaacctactatcggcacttgttaaggctattcgcattcttcctgcggtttccacagctacaaacaggccgccccgtgcgcgccgcataccaccgtgttatatccgtttaccatctcaagttcctcctttagacttctcattgcaatcagtgtttgaaccagtgcaaggaagagcgaaactgtgttgactgggattccgttgagtagaaaaatgcttgtcaccataaccaacaattggaacgaattcactataacacagattttacgaaaatgcaattgtttgcggtaggggcggtcaaatctctacggccctctcggtcgggcaacggcccggggtcacgtgtgcgaaaaaggcgaaatcaaaagggtaattaagggaggtgaactcggatgcccacaaaatcgaataacacgggagggcgcggcggcgcaagacccggtgcgggaaggaagaaatccgcagtcaaggacaaagccgaaagcggtaatcccggcggcagaaaacttgaagtgctggatattcccgaagtcgagggtgttgtcatgccgaagccccatgattttctttccgccgagcagcgggacggcagagtcctgcaggcgcaggaaatttacacggaaacctggcagtggctcaaaggcatcggctgtgccgcaaaggtgtcgccgcagctattggagcgctatgccatgtgttccgcccgctgggtgcagtgcgaggaaatgaccaaccgcatgggtttcctctccaagcaccccaccacgggaaagccgatcccgtctccgtttattaacatcggcatcaactacatgaaccaggcggttcggctctggaatgagatcttccagatcgtgaaagaaaactgcagcacggaatacggcgagtctacgccgcaggatgaccttatggaacgcctgctccgtgcgagaaaggggtaacaccatgtttgaaaaagtaaatccgtgccacccggataaggtggcagacagaattgccggtgcgctcgttgacctggcatacaagaaagcagaaaatccccgcatcgctgttgaagtcctcatcggccacggtgtgtgccacatcattgcggaaacttctgtttctctggacaaggcgggtgtcaccgctgccgttcaccgcattgccggaaatctcaccgtggactatgtggaagtgccacaggacggtcaccttgccgataaccaggcagacggcgtccgctgtggcgataacggcatcttcaagggaatgcccgtgactgaagagcagaaaatgctgtcgcagatcgcacggaacattttctccgtgtatccaaatgacggcaagtacatcctggatggcgaccggctcatcctctgtcagagcaatgccgagacacagcatctgcgcgagatttatcccgatgcggagatcaacccgctcggcgattggacgggcggcatcgatgtggacaccggcgttgccaaccgtaagctcggttcggatatggccgactcggtgacaggcggcggtctgcacggtaaggatctatccaaggcagatgtgtctgtcaacatctatgcttttctcaaagcccaggaaaccggcaagcccgtgacactctgctgcgctattggggacgatgccgtggacggcagaccctacgccgaaatcgtggagatcgcccgaaactacatccactcggtcggcggcttcgagaaatttgcggaatgggggctggtctaatgaaaacaacgaccgagatgcagctcgtacctatcacgaagctggttccctatgtcaataacgcccgtacccattcgccggagcagatcaacaaactctgctcctcgctccgtgagttcggttttatcaatcctgtcatcatcgaccgtgactatagcgttattgccggtcacggtcgtattcttgccgccaaggaggaaggcatcgccgaggtgccgtgcgtctttgccgaccacctcaccgaagcccagaagaaagcctacatcattgccgacaaccgcatggcgatggatgccggatgggacgaagcgcttctgcgtgtggagatcgagtccttacaggcggcggactttgacccgctcctcaccggctttgacgagaaagaactgtcaaagctgtttgacgacggtaaggacatccaagaggatgattttgatgtggatgccgagctgcaaaagttgaccttcacgaagtccggcgacatctggacgctgggacggcaccggctcatctgcggcgacagtacaaaagaggaaacctacaccgcactcatggacggccgcaaggcgaacctcgttattaccgacccgccctacaatgtgaactacgagggcagtgccgggaaaatcaaaaacgacaacatggcatcggagaagtttttcgacttcctcttcgatgccttttccaatatggagaaggtcatggcggacgatgcctccatctatgtgttccacgccgacactgaggggctgaacttccgaaaggcttttgacgctgctgggttctatctttccggctgctgtatctggaagaagcagtccctggtgctgggacgctctccgtaccagtggcagcacgagccgtgcctctacggctggaagaagaaaggcaagcaccagtggtacaccgggcgcaaagagcccaccatctgggagttcgacaagcccaagaaaaacggcgaccatcctaccatgaagccaattccgctgcttgcctatcccattcagaacagctctatgacaaactccgtggtgctcgaccccttcggcggctccggttctacgctcattgcctgtgagcagaccgaccgcatctgctatgccatcgaactggatgagaagttctgcgacgtcatcgtaaaacggtacatcgagcaggtcggctcggatgaaaaggtcagcgttctgcgtgacggcaaggaatacaagtatagcgaggtagcgccccatgacgaatgacgcgcacagcattgtgtggtctgcacagtcccgcgacgaataaatctacatcattctcctcatctgagccttgctattcagagcgttcagagcgaatatgtgactacccaaaatcaaggaggtcacttaaatgacgattacaattaacgcccagggtgcggaacgcaagcggctggtacagaccatcgcacagtggctcggctgtgaagccaagtacctgggggttccgtcctgcgcctaccaggtggactgcttcaccatcgaccgaaacggcagcctttcctttgacgaccatgccgacagcgaggtcattgaaagattgcttgagcatatctacgatgagggctttgacatcgaccagagccacaccgaggatgaggacgagccttgcgccgtctgcgtttccatgccgaagagcctgttcaccgacagcaatctggaaaatctcaaggcactcatcacagccaagggaagtcttatcaagaaagccctcggagtcgctgacctgccattggaagttaccgacacgaaggtatccttcccttggttcccggcgattcccaccccggacgagatgaacgcctacgacaccttcatttgcaagctgtgcgaaatggcgcggacgcaaaagcgtgtaacttccaccgagaagcccaccggcaacgagaaatatgcgtttcggtgctttctacttcggttgggcttcatcggcgcggaatacaaggccgctcgaaaaatcctgctgaagaacctgtccggctcttcagctttcaaaaacggaggtacagaacatgagatttccaagtaaggaaacggtcgagcgtattcgcaaggaatatccggtcggcagccgtgtagagcttgttcggatggacgatccccaggcaccgcctgtcggcacgaaaggcaccgtgcgaggtgtggacgatatcggcagcatcatggttgcttgggataacggctgcggcttaagcgtggcttacggcgaggacatctgccggaggtgcgacaatgaatgagaaaatccgagagcagattcttaccgtccgcaagaccggatgcactaatatgtttgatgtgctgatggtacagtacattgccaatgagatgcggttttacgaactggtggtattcctcgaagaacaccgcagcgagtatgtgcatttcatcctcacgggagaaccgctgtaatatacacagtttccacccccaatgattgtgtagtatatatctccgatgtaactggctatatccgtacttcagaggtaatatacactcacaacaaaacaaacggaggtacacagttatgtggaaagaaggcagcatcagagttaacggcgaggtttttcactactggatgaagcagtacgacaaaggttccgagtggggcatcgacggcggacgcatttccaagctaatgttcaagcgcaacggatacatcgtctgcaactacgacagaggttgggacatcgaacccgccgatgagaacacgcagcttgcgctggagcttctgctccacagcgagaactggtaacccaataattccataaagaggctgagccgaaaggctctttctctcgtatattccgaaacagccacagggctgtattttttatgcccaggaggtggtctctacgagaaaactgaaaacatataagcccacaaggttcatggagaaaacttcccactatgatacggacgctgcggattacgccgtcatgttcatcgagagcctctgccacaccaagggcacctgggcgagaaagcctttcgagcttattgactggcaggaacagatcattcgggacatcttcggtgttctcaagcccaacggctatcggcagttcaatactgcctacatcgagattccgaaaaagcagggcaagtccgagcttgctgctgcggtggcgcttctgctcacctgcggtgacggagaggaacgagccgaggtctacggatgcgctgccgaccgtcagcaggcgtccatcgttttcaacgtagcagcagatatggtgcggatgtgtcctgcgctttcaaagcgggtcaagatactggattcccagaagaggctcatttaccagccaacaggcagtatctatcaagtgctttctgccgatgtgggcaacaaacacggatttaatacccacggcgtggtgttcgatgagttgcacacccagcccaaccgcaagctcttcgatgttatgaccaaaggctccggcgatgcccgtatgcagccgctgtatttcctcatcaccacggccggcaacgatacgaaatccatctgctatgagattcaccagaaagcaaaagatatcatcgagggtcgaaagatcgaccacaccttctatcccgtcatctacggtgcggaggaatcggacgattggacggacccgaaggtctggaagaaagccaatccctctctcggcatcacggttggcatcgacaaggtcaaagacgcctgcgagtcggcaaagcagaaccccggcgaggagaactccttccgacagctgagactcaaccagtgggtcaaacaggcaattcgctggatgccgatggacaagtgggacaaatgcgagttcgccgtcaacgaggatgatctggaaggtcgcatctgctacggcggtctggacctttcgtccacaacggacattacggcgttcgttctggtgtttccgccagaagatgagaatgacaagtacgtcatcctgccgtacttctggataccggaggacaacctcgacctgcgagtccggcgtgaccatgtgccatacgatgtgtgggagcggcagggatatctgcagaccaccgagggcaatgtcgttcactacggctacattgagaaatttatcgaaagcctgggtgagcgtttcaacattcgggagattgccttcgaccgctggggtgctgtgcagatggtgcagaacctggaaggcatgggcttcacggttgttcctttcggacaggggttcaaggatatgtccccgcccactaaggagctgatgaagttggtgctggagcagaaaatcgctcacggagggcaccccgttctacgctggatgatggacaacatcttcatccgcaccgaccctgctggcaatatcaaaccggacaaggagaaatctacggagaaaatcgatggtgccgttgccaccgttatggcccttgatcgggccatccgatgcggcaacgacactatcgagtcggtctatgacagcagagggctgctgtttttataaattgcctgttagcgaaattctgatgtcagttctgaggtgtactcccatactcgatgccactggttcttaaaacgggagtacagctcaccagcgatttccttcattgggcaggtataccggcaccccatatttgttatttgaacccagtcacaggcgtaattgatacaaagtaccaatattgttaatcactccgtttcgatcacttcataatcggggtcttcataatcctccaaagggtagtcacctgggttagacatataaagtgtctccgcaccttcccgtgaacaggagatcatgtagtccccgtactcttttgcctcctcttcggaatcgaagagttcatcctcttcctcctcggtaccatcggggtatttcataaggagtttgaatttacgacaagaatcatcacccagggattccggctcaaagtcatctgtcgattcatcagagtcgctggttccctttgtagccaagtatgcagcgcccaccgctacaccgataatgccaacaatttttgccccatccttaaggcgctccatccacttggctttgcgcttttcacggcaatcggggcagagcttctgttttgtacccggctcaagcactgcaccacagtcgcggcaaacaacagtgtgagttgtttcatctggcaaaggttcaataggtgtcacatgaagactctcagcgttgaatgccccaatggggtactcactaatatatccagacactgcgaaggatcgtccgcagctatggcactgacactctatattctcaaattcgtaaattacctcatcgcccatctgccgttcggaagtggaaacagttccttcatcctccaagtcgatgcgattttttgctttgcaataggggcattcaacaacacgttgtagactaatgcggtcatcttcccacgatgtgtcatccccaatttcttctgctgcctgccggagttttaccttttcgcagtactccagcagagcttttctaaagatttcagacttgggaacgccagtcgcattgctggaaaaagcaagcatttcatcttctttatcattgagacggacacggtattgcttttcacgactgtctctctttttgggcctaccaagcatttaatcatctccttcgctttaatggatatccagaaattctgtaatcaaaggatacatctttcttctcgctctgtcaagtatgtgaatatccaaaaacaaaaagaaagtgaggtcaagtcaatgggcatcttttctggcttattcaaatctcgtgacaagccccaaaaccggacatccggcagcgggtacagcttcttcttcggcggcacaacttctggcaaaacagtgactgagcgctctgctatgcagatgactgccgtgtattcctgtgtccgcattctgtcggaagctgtcgcaggactgccgcttcatctatacaaatacacggacagcggcggcaaggctatggctcacgaccatccgttgtatcggctactccacgatgagccgaacccggagatgagttcctttgtgttccgcgaaaccctcatgacgcacctgctcctctggggcaacgcctatgcgcagatcatccacaatggtaagaacgagatcgtggctctgtacccgcttatgccgaacaggatgtcggtggacagagacgagagtgggcggctgtactatacctattaccgagggtcggatgaagccatcaaggataaagaattcgccgtaacgcttcagcccacggatgtgctgcatatccccggtctgggttttgacgggctagtgggctacagtcccatcgctatggcgaagaatgccatcggcatggctatcgcctgtgaggagtatggcgcgaaattcttcgccaacggtgccgcaccgggcggtgtgttggaacaccccggcacgatcaaagacccgcagcgtgtgcgggaaagctggcagtccaccttcggcggcagcggcaacgccaataagattgccgtactggaagaaggtatgaaatatacgccaatcggcatttcgccggagcaggcacagtttctcgaaacacgaaaattccaaatcaatgaaattgctcgaattttccgagttccgccccacatggtcggcgacctggaaaaatcgagcttttctaatattgagcagcagtcccttgagtttgtgaaatacacccttgacccctgggtcatccgctgggagcaatcaatccagcggtcgcttttgtccaaggacgaaaaagctgtgtattttgtgaagttcaatctggaaggcttgcttcgcggcgattaccagagccgcatgaacgggtacgccatcggccgccagaacggctggatgtccgccaacgacatccgagagttggaaaacctcgaccgtatcccggcagaggatggcggcgatttgtacctcattaacggcaatatgctcccgctgaaaaatgccggggcttttgcaaatacacctaccgatgacggaaaggaggaaaaaaccgatgaagaaattttggaattggaagaaccagacggagacagcggaaaggacgctgttcctgaacggaaccatcgccgagcaaagctggtttgacgatgatgtcaccccgcagcttttcaaggacgaattgatgtccggcagcggcaacatcaccgtctggatcaacagccccggcggcgactgcgtggcggcggctcaaatctacaatatgctcatggattataagggcgatgtgaccgtgaaaatcgatggcattgcggcatccgcagcgtccgtcatcgctatggcaggcacgaaggtgctggtgtccccggtgtccatgctcatgatccacaaccccatgacggcggcattcggcaattcggaggaaatgcagaaagctatcgagatgctctcaagtgttaaggattctattataaacgcctatgaaatcaagacggggctttcccgtgccaagctctcgcacctcatggatgccgaaacttggatggacgcaaacaaggctgtggaactcggctttgcggacgggatcatgagccgcgccgatgagactgaggacatagccgcacccaccgtttccatgctgtattccaaggcaaacgtggtgaactccctcatggagaagatcgccgcaaagtgcgccattgaacccaaacccaaccgtacacaaaaagccaccgatttgatggaacggctcaaccttattaaaaactggaggtaatgcaatatgacaatcaatgaactgcgtgaaaagcgcaaccaggcttggaacgctgcaaaggcatttgtggagaccaagcgtgacaaggacggtctgctttccgatgaggattctgcgacctatgcccagatggaaaagaaggttcaggactacggcactgaaatcgagcgcatggaggctatggcagcgatggaggctcagctttccaagcccacttctgcgcccatcaccgaaaagcccctgaacggaaagaccaccgaggataagcagcctaagagcttccgtgccaccgatgcctaccgcagcggtatgctcaacgctctgcgtaccaacttccgtcagatcagtaatgtgctgcaggagggcatcgatgccaatggcggctatctggtgccggatgagtatgacagccgtctcattcaggtgctcaacgaggaaaacgttatgcgttctctcggcactgctatcaccaccagcggtgagcacaaaatcaacatcgcagccaccaagcctgcggctgcgtggatcgaggagggcggcgcactgactttcggtgacgctaccttcgaccagatcatcctggatgcccacaagctccatgttgctgtaaaggtgaccgaggagctgctctacgataacgcattcaatctggaaaactacattctggagcagttcggcaaggctctggccaatgccgaggaggatgcgttcatcaacggcaccggcaccggtcagcccctgggtattctcgccgaaaccggcggcgcacaggtcggggtgacaacgaaatcttctggcaaagtggcagccgacgaggtaatcgatctggtgtactcccttaagcgtccctaccgtaagaacgccgtgttccttgccaacgatgtctgcgtcgcagagctccgcaagctgaaggacagcacgggtcagtatctgtggcagccctctctgcaggcgggtgagcctgaccgtgtgctgggttacaaggtttacacctctgcgtatttccctgtccctgctcccggcaaggccgcagtcgcattcggcgacttcagttactacaacatcggtgaccgtggctctcgttctattgcggaactgaaggagctgtttgctggaaatggcatggtcggctttgtcgcaaaggagcgtgtggacggaaagctggtgttgcccgaagcagtcaagctgctcaaaatggcatctgcctgatgagaggaggcggcggtgatggacgagcttctttccaaagtgaaagccaaccttatcctggaacacacggcggatgatgccttgctgaaaagctacatcaccgccgctgtttcttacgccgaaagctaccagcacatcccggaggggttctataaggagaatcccatgccagccaccacagagcaagccgtcattatgctgtcgtcccacttctatgaaagccgggacggcagcacgggcggcttctttgcggataacaccggagcggcacagcaggtgtggaacacggtcaatctgctgctccgcttggataggcggtggcaggtatgagttttggaaaaatgaacggctttgccgacatcgtagaaacccgtcaaatcaaggacagcgagggcttcatccattccgaggatgaagtcctcgcttccgtccgtgtgtaccgggaaggccggcacggcagtcagcgttgggcgaacctcgctgcattcagcgaagcgaccgacctgttccgctttcggtgtattcctgggctgacggtcactaccgaccattttctcatctgcgatgactgccgctacgacattgtgtccgtagagaatgtcaaaggccgtgggatgtacatcgaggttttagcgaaaaggagtgaacccaccattggcaaaagctgaaatgaaaatgccggaggattttctcctgaagatctccaagctcggcagcaactttgacagtgtggcagataccatcctgcaggccggtggcgaagtcgtgctgaagaaggtcaaaagcaatctctcatccgttatcggcagagggacaaagttcaaatcccgcaccacgggcgaactggagggcgcactcggcctttctccctccaagctgaaccgggacggtaaccacgacatcaaggtcggcttcgcagaaccccgctcggacggcggcagcaacgccaaacttgccaacattctcgaatacggcaagcacggtcagcctgcaaaaccgtttctgaaacctgcgaaaacggcgtcccggcaggaatgcatcgatgccatgaccaaggcactggatgaggaggtggaaaagctgtgagcctgctatccgatttacaaaccatcgcaaaaagttgtggggctcccgttgaaacgggtgtgttctccggcaaagcactggacacatatctggtcatcacgccgctgtcggacaacttcgagcttcacgccgacaacgctcccggctgcgaaacgcaggaggcacggctgtccctcttcacaaagggcagctacaccaaactgaaaaatacactcgtccgtgccttactgggcgcgaacttttatattaccgaccgccggtacatcggctttgagaccgagaccggctatcatcactacgccattgacgtggcgcaaatctacgaactggaggaataagttatggcgactatcggtcttgacagactgtattacgcaaaaatcaccgaaaacgacgccggtgaggaaacctacggtacgccgtcccagcttgccaaagccatctccgctgacctttcggtggaactggcagaggcaactctatacgccgacgacggtgcttcggagatcgtaaaggaattcaaatccggcacgctctccctcggcattgacgatatcggctctacggcggcatccgacctcacgggtgcaaccatcgacaaaaacaaggtgctgatttccgcatccgaggacggcggcgaccctgtggcggtgggcttccgcgccaagaagtccaacggcaagtacaagtattactggctgtaccgcgtgaaattcggtattccggcgacgaaccttgccaccaagggcgacagcattaccttctccacgccgaccattgaaggcaccattctgcgccgcaacaaggcagacgcaggcggcaagcacccgtggaaagcggaggcactggagggcgatgtgaccgctgcgactatcacgaactggtataaggaagtctatgagccgacctataccacgacacccgaaaaacaaggttaacggaggtaacgcacaatggataacgaaagaaccgcagttatcaacatcggtgacgaggagtacacgctgctcctcacaaccaaagccaccaaggagatcgccggtcgctatggcgggctggaaaacctcggcgagaagctgatgaagtccgagaactttgaaatggccatcggagagatcgtgtggctcatcacgcttctggcaaatcagagcatcctcattcacaacctcaaggataaagagcatcccaaggagctgctcacggaggatgtggtggagcttctgaccacgcccctcgacctcgccggatacaaaaccgccattacggaggcgctctacaagggcaccaagcggaatgtggaaagcgagaaagacgcaaaaaacgcgcaagtcgggtaacggtctccgatgcggagctgtttacccagcttctttattacggccttgcccacctgcatctcagccaggatgaggtgtggctgatgccgtttggtctgctgctggacttatgggagtgccacaagcagtataacgggcaggcctccccggcacgagagcattacatcgacgatattatcccggacggcatttgacccatatcgggcagcttcacctcgaacttagtccgtttccgtcacaacttctttgtgaactttttcgtatagccttgatatttttcaaaaatcgtggtatactacacatagaagttcggacggtttcgtcctaagtacgaggtgaaatgcatggttaaacgagattcctatatgaaccgactgatccacagtatgtggaacggcgagataaaggtcatcacaggcatacgcagatgcggcaagtccgtactgcttttcgatctgtttttcgagtatcttctttcgcagaacgtttcggaagatcatattttgaaaatcgaactggatcagcggcggtactataagttcagaaatccgatcactctgtgcgaatatgtagaaagcaccgtccgggacaggaaggatgaaaaattctatctgttcattgatgaggtgcagttcaccacgaaagtagtggacaaggaaaacggcggcatcgaggttaccatctacgatatgctgaacgaactcaaggcatataaaaaccttgatgtttatgtcaccggcagtaactccaaagggctgtcgaaagatatcgcaacagagtttcgcggtcgtgctacacagatccatgtgttccctttgtcatttgcggagttttattctgccgtgggcggcgacgagcaaaaagcgctggatacctatatgctctatggcggtatgcctagacttttagcactggaggatgacaaagataagaaggattatctgacctccctctacagcgaattgtatgtcaaggatattgtggagcgaaacggcatcgagcgcgaggatgttctgaatgatattctggacttccttgcttcgcagatcagttcgctgacgaatccgaccaatattgcaaatgccatcgcgtccatgaagaacgaaaaaatcaatcccgcgatggtttcaaactatgtacagtatgttatcgactctttcctcatttcaatggcaaagcgatacgatgtcaaaggaaagacctatttcaagtatccgaacaaatactactatacggatatcgggcttcggaacgcacggctgaattaccgccagtatgatcccggtcatatcatggaaaacatgatctacaacgaacttctgcggcgcgggtactctgttgatgtcggtgtggtctgcgaccgcgcaggcgacagcaaggttcagaaagagatcgactttgtggtaaacgatgcagataaaaaaatctatattcagtccgctttccgcatggataccgataaaaaggaattctccgagctggcatcgctgatgcttaccaaggatttcttcaaaaagattatcgttcgcatggatgtgccgcacaatttttatgacgacaacggcatcttccactgcaatctgatcgacctactgcttggccgggtagaattgttctgacaaaataactcatatatctacgaggagtgacctttcggggacactcctttttcataccatcagtcacgctttcatcgaaaacttcggacggtgtcgtcccaacttctcggtgagagggtgcttttttcatgccatccacaaggaggtgacggtacatggcagacagtttcggactgaagatcggtcttgagggcgaaaaggaattcaaaaaagcgctggcggacatcaaccagtccttcaaggtgctcggctccgaaatgaaactcgccacctctcagttcgataaaaatgacaaatccgtggaggctctcgccgcacggaataaggtgctgcgaaaagagatcgatgagcagactacaaaaatcgaaactcttcgcaaggctctgcagaatgccgccacctcctttggagagaacaaccgccgcacccagaactggcagatccaactcaacaatgccgaagccgccctcaacgatatgaaccgtgagctggacgagaacgagaaagccatcaaggagggcggcaaagccgcagaggaatccggcagtaagtttgaaggcttcggcaaagttctcaaaaccgtaggtgtggcgctcggcgcagtggccgttgccgcaggtgccgccgccgtgaagctcggcaaagaggtcatcgccgcctatgcagactacgagcagttggtcggcggtgtggataccttgttcaaggactcctcgcaggagatccagcggtatgccgccaacgcatacaaaacggcagggctttctgccaacgagtacatggagacggtcacgggcttctccgcaagcctgatccagtctctcagcggcgataccgaaaaagccgcaaagtatgcggatatggcaatcacggatatgtccgataacgccaacaagatgggcacggatatgtcctccattcagaatgcctatcagggttttgccaagcagaactacacgatgctcgacaacctcaaactgggctacggcggcacgaagcaggaaatggagcgactgctcaccgatgcggagaagatatccggtgtcaagtacgacatctcctcctacgcagatgtggtggaagccatccatgtcatgcaggagagcatggacattgcaggaacgaccgccaaggaagcggaagccactatttccggctctgtcaatgcgctgaaatccgccgtgtcgaacctcatcgtaggctttggtgatgcggacgctgacatggagctgctgtgcaacaacatggtggatgccttcaagaccgtggtggcgaacatcaccccggttattgagaacatcgtggcggctctgcccacagcgctggacgctctgctgacggctgtgggtgaactgctgcccacactgctggaagcagtcaccgaactcttctcgcaggtgctggaaacgcttctgtccctgcttccgcagcttatcccggcggcggtgtccgcacttatgaccatcgtgaacacgctaattgagaatctgcccctgctcattgatgcggcagttcagttggtgtccacgctggtgacaggaattgcggatgcattgcccacgctcatcccggcagcggtgcaggctatcgtcaccattgtgcaagggctggtggacagcctgccgatgctccttgacgcagccttacaacttatcacgggactggcgcaaggacttcttgacgcaatccccgtgttgatcgccgctctgccggagatcatcaacggtatcattaccttcttactggattcgattcctcagattatcgaaacaggcattcagcttctgacctcgctggtgactgcattgccggagatcatcacggcaatcgtggaagctatcccgaaaatcattgacggcattatcaatgctgtgctgaatgcgataccgctcattattcaggcaggcatcgacctgctgatttctctcattcaagccctgccgcagatcatcacgaccatcgtgcaggcgattccgcaaatcatctccggcattgtcaatgctctggtcggaaacatcgataaaatcatcatggcaggtgtgcagttgttcgttgcgctgattgaaaacctgcccaccatcatcgtggagatcgtcaaggccgtgccgcagattattgcgggcatcgtgaaagccttcggctctctgatgtataaaatcgtagaaatcggcggcaacatcgtcaagggactgtggagcggtattacccagcttacctcgtggctgtgggacaaggtgtccgggtggatttcctccatctgggacggtatctgcgatttcttcggtatccattcgccctcaaaggaaatggcatgggtcggtgaaatgctggtcaaaggcttgtccggatccattgaagataacggcgatgaagcggtcaaagccgcagaaggaatggcggaggacatcaacggcgtcatgggcgaccttgctcacgatatgcagacggctctgcccaccgactttgacgtgaacggctcgatccgctctgccgtggacggtgtggtcggcaaggcggcatccactttcaccgttgccctgaacattacgaacttcaacaattacaacagtgaggatatccgtcagctcacctccgaagtcatggaaacggcgaatcagttcgcccagcggaaaggagtgatattcgcatgacctatttcacctacaacggccgcagttccgctgatttcggtctgcatatcgagaagaaggatgtgttctccgcaccggagtacgatgcggagttcatttccattcccggcaggagcggtgacatcatcaatccgaaccgccgctttgccaacatcaaagtgacctacacggtgttcctcgcacggaagaacgtagccgcccttgcatccgacctgcgggacatcaaaggctggctgtactccgagccagacagataccacgaactcaccgactcttacgatgcggagtatttccgctacggcgtcatctccggcagtctggacattgaggagcagctgagcaaggtcggcagctttaccgtgaccttcaactgcaagcctttcaaatacagctttgcggggcaggaaacggtgtcggctgacgcttccgaactgacgattaccaatccaactgcttttgaaagtaagccgtatatcaaactctatggcagcggtacggtcacgctcaacatctcatcgggcggaagcacaacttcgtggacgatttcagctattaacgagtacatcgaaatcgacagtgagctgatgaactgcttcaaaggcaccatgctcaaaaatgatgtggtcaaaggggctgagtttccggttttcaagtcgggtatttgcaccattaactgcaacggcgatgtgtcaaggattgaggtcattccaaggtggtgctgtttatgattcctgtactttactccgcaaacactacggatttctcgaccttcggtctcggtgtgctgacggataccattttctgcgaagtcactgaagagcgaaacggtgtgttcgagtgcttactcaaatacccggtcagcggtcagcactatgggcttatcaccaaagagtgcatcatcaaggcaaaacccaatgacaccgccgccgaccaagcgttccgtatttaccgcatcacgaagcccttaaacagcatcgttaccatctacggacagcacatctcgtatgaccttgccaatgtgccggtgatgccgttttcgacggagagccgttctccgcagcttatcctctcgcagcttcttgccggagatacacgcttcacgggccggacggactactcggatgcaaaggcattctctgttgcccagccgaaaagtgtccgcgcctgcctcggcggtacggaaggctccatgctctccaaatggtacggcgagtttgagtgggacaacttcacggtaaagttccattcgcaccgtgggcagaagaccggcgtggtcattgaatacggcaagaacctcaccgccttggagcaggacgaggacaacagcggcgtgtataccgcattgctcccgtatgccatatacacgccggaaggctcggacaccgaaatggtgatcacgctgccggaggtcacgctccccattgtgacctcggagatcgtccgggcgaaaacgctcatcatggatttctccgaccagtttgacggagttgtgaccgaggaagccctccgagcgaaagccaacagctacatcaaagcaaatccgctgggtgcgaccatccctacggtgaaggtgtcctttgagccgctctggaaacagccggagtattcggcactcttggcgcgggtcaatctctgtgataccgtcaccattcggcactcgctgctgggcgtcagcgtgtcggctatggtcattgaaaccgtgtacgacaccctcgccgaacgatacaagagcatttctctcggtcaaagcaagtccagcatgatcaccaccatctccgaggtgcagtccacggtcgataaggtggagtccgcagtgggacgctttccgaaactgctccaaaccgccatcggcaaggctacagggcttatcaccggccagagcggcggctatgtggtcattcacaccagcgaggaaaacggacagccctatgaactgctcattctggacgctccctctattgatgaagccgtaaatgtctggcgttggaatgtgggcggcttgggcttttcccataacggctacaacggcccctatgaaactgccatcacggcagacggtcagatcgtcgcggacttcatcacctccggctccttggtggcgaacaccatcaaggctggtgtcattcagtcacaggatgactcgtcctggtgggacttggagagcggcgaggttgtgcttcgagcctatgtttcgaccgatgaatttgcagagaaaacagcctatctccagcagaatgtggatgggctgaacagctatgtggcgactcttaccgaaactatggagtcggtttccaacgaccaaggcatactggaagagcggctgcgaagctccgaaagcaaagtatctcagcttcagcacacggtggaaggcttgtccgtcaccatgcaggagcagtacatcggcggcatcaactatgtgcaaaactcttccggcctgaacggcatcacggatgattggagctattccggcaccgtaaaaacggatgcctccacggacacccagaacaacaccgtttccgactcctgctttgtgctgggagcttactcctcgctgtcgcagtacatccgaggggtagttcccggcacttatacagtttccgttcgcgccaagaaaacctcgaccatgtccgggcatttctatgtgacctacaacggaaacaaaactgcgtatctcttcaataagagcaccgcttttgactggacggattttaccgtcacgctcaccgatgtgaccgaccccacgctgcgcgtctactgctactgccggaatgcatccatttatctggcggacattatgatcaccgaaggtgcgatcccacgaaagtggacgcctgcacccaacgagatctatacgcaagaggtcaaaatcgacaagcgcggtattgaggtgtccaacagcgcatcgtcccagcgaacagtcatcacgaacacggagtttgccggttactacaacgatgaggtgattttcaccctgaacaaagatgaaacacaaaccaagaaaaccacggtggacggcgatttgaccgtgggcaagacgaagttcgttcccatgccgatagcgtccgatgggctgaatatcgtcattctggactaaaggaggtaaggctatggcaatgacaggcggcgctgcctatttggtgaaatccgaaaggacgaattacggctccaacagctggacgactgacctgtacatctatgtaaaggttatttcccagaacgtagtcgcaaacacatccaccattgcgttgggtatgtatgtctattcccagtattccattgcgtggtcggactttggcacaaacggcacttcctacatcggcacagccacctccggtgcgaactgcttcacctttaccaatgggcaaagcggcagcggcacgaagtggctggtggaggacaagcaggttacggtatcccacaacagcaacggtacgctgacccttccgatttactggcactggggtgtcaacagcccgtggggtcagtacacaggaccctccggcagctacaatgtgacgctgagcaccatcgaccgtgttgcacccaccgtgaccttttccgtttcgagcatcaccgcaaacggctttaaaatctctgcaaactccacctcaacagcggatatctggcagtacagcaccaacggcggctccacatggatgacattctcaacatcggcatccaccagtgccagcgtaacgttgtcctcgctttcgccgaacacaaactacacggtgaaggtgcgggcacggcggcagtacaaccaagtctatggtacatccggcggctcaacggtgaaaacgctgggcggcgcagtggtgaacagtgtcagcacggtgactgcagacaatgccagagtgaccatcaccatcaatgtcaccgtgtacgaaccgtcttacatcaattctctggcgatcaaaagcgggaacacgaccctcctgaccgttaccgggcttgcatggacgaagggtacggcgaaccgctcggtcaccctgtcatcggcacagagaaccacgctgctcaattggatggcttcaataaagtccttcaccggcacctttgccgtttcctccttcagcggctcaacgcagatcggcagcacctcaagcaagactgctacggtgcagactacggcggcaaactccgcaccgactctcagcgatttcacttatgaggatagctatgcggtcacgaagagcattacagagaacaatcagctattcattcaagactgctcgacgctgaaggtcactcccggaacagccaccgcaaagaacggcgcatccatctcaaactacacagcagcctgcaacggtctgtccgcatccagttccagcggctctgccatcacgctcggaaagatcaccaagtccggcagcgtgatagttacgcttacggttgttgattcccgcggctacaccgctacgctgacgaagaccatcacggtcattccgtactctgcgcccaaaatgtactcggcaacgctccggcgaaccaacgacatcgagccggagatgcagctcaagttcagcggctcaattgcggccatatctgtgaacggaacgcagaaaaacagcgtggtctacgcacggtatcggtataagaaaaccagtgatgccgattatagcggctttaccagtataattgccggacttacccagagcggcacctcattcagttactccaaccttgagctgtgcaacctggatgctaacagctcctatgactttcagctacagattcaagacaagctctattcccagagcagtctggatctgtattttgttgtaccacagggtacgccgctgattgcactgcggaaaaagaaggtaggcatcaacacaccgaatccgcaggctgcgttggatgtggcgggagatatgcgtgtgtcaggtggtctgcgtgtgggcggagcatcccttgccgactttgtcatacagcaaggaaccagcggaatctggtctttccgaaagtggaagagcggcatggcagagtgttggggtgcgtacaacttcaccgttgccataacatccgcctggggtgcggtatatgaaagtggtctgatttcgctcccgacgtttccgtttacattcgcagccatcccaacggtgttcttctcctccggcaacggcaatgctgcttttttcgttgaacgaggaaacggcgagacacgaacaactaccacaagtcccggtaagttctatgcgatgcgcccggtttcgaccggctcaagcaactaccaaatcaccatatacgcaatcggaaaagtgtgacgcttttttggcgtcacttttttatacgcaaattcaacattcaaaggaggacaacaacatgaaagaattctggacgaccattcaggtagcctttgcggcagtaggcggttggctcggttggtttatgggcgggtgcgacggcctgctttatgcgctgctggcattcgtcgtgctcgactacatcaccggtgtcatgtgtgccattgtggatcacaagctgtcaagtgagattggtttcaaggggattttcaaaaagctcctaatttttgagctggtcggcatcggacacatcatcgacgcacaggtcatcggcaacggcagcgttctgcgaaccgccgtgattttcttctatatctccaacgagggcatctcgctgattgaaaatgcggggcatctgggactgcccattcccgaaaaactgaaatccgtgctggagcagcttcatgaccgtgcggaaagggaggacaaataatatggcttacacgaacagccctctggtgtcctacaccaaactcagcccgaaccattccgggcagcgcacccacaacattgaccgcatcacgcctcactgcgtggtgggtcagtgctcggtggaaactctgggcaatatttttctgcctgcatcccggcaggcaagcagcaactacggcattggcgtggacggcagagttgggatgtatgtggaggagaagaaccgctcttggtgctcctcttccgcagccaacgaccagagagccatcacaatcgagtgcgccagtgacagcactgagccgtatgcgttcaaggatatggtgtacaagtgcctcatcgagctttgcaccgatatctgcaggcgcaacggcaagacgaagctgctctggttgggtgataagaataagacactcaattacatcccaaagcaggatgagatggttctgactgtccacagatggtttgccaacaagagctgccccggtaactggatgtatgcccgcatgggcgatctggcatccaaggtcactgcggctctcggcggtgatgtaaagcctgccgacccggtcaagcccactggcacacttcatgttggcgacctcgtgaccatcacgggcagcacctactatggcggcaaaaccattcccggctgggtgaagaaactccgctggtatgtggtcgaggtcagcggcgaccgcgccgtcatcaacaaggatgaatccggcaggtacgccatcatgtcgccggtcaagacctctgcacttgccgtggcaggcacgaaacccgtcgaggactaccgcgtccataccgttgtacatggcgacaccctctgggcaatcgcaaaaaagtatctcggcaacggcagccgctataaggagcttatcagcctgaacggactgaaaagcaatgtcatctacagcggcatgaaactcaaaatcccctataagtaaaccgaaagcccatcgaggagagcattttctcttcgatgggctttttctattagttcgttttagtggcttcgcttaaaatttcggggaattcatctttgctccctccggtgtcactgctatacagcttaccaggagcctcactataagtaattatgtagtcgtttcaattcctaattcgataaaattctcatcgccgattgagcatccaccgagaatcaagaaatatagctgtaaagtttggttgcggatttccttgaccctatcaattgtctggaggttatccttatgaaaaaagccattcctatgcttttcacgccagtttttaatagtcgctgttatatgtgttttagcgtgataattgacatcaaacatccaactattatggataaggactccctcaagagaacccaaggtggtatcaataacatcttcgctatttgtggtgtattcaattaactcaccatttttcgctctgattttgaatgattttcctgtctggaatttaaggatggtccaaattaactgctctactgattttaagtagccagatataatgcttgtcaaatccagattttctgtaagttcatacatctcgaaattccattcggatgtaatgaaacttaccgcaaaattagctgatccaaccattgctttccacaggccgcgatcaatataatttttagtcataatatcaatttgcggctgatatacactgtctgggattgcatcagcgtatggaaaagtacgcaagacttcaccagttctggctttgaacttttgcaatgcggcttctgtaggtgttactacagtactgaatccgatgatttcttttgctttttcattaaatgcatttaaataatcagccagaacctcgaactcgtctcgtccaaaatgccgctcccagaactcacgaatagtaacacgctcaatggagcaccccgttctcttattgaaatcatttacgcatcgaatgagggcatcatatacctctctgtccggatcgatgagttttataaatttgattccatcaacagcatacttgccctctgtgaagcgtgaatagtgcttgggttcatcgtccgttacacagaagataaccccatattttctgttgtcttcttctagcacaatctggaatggcctggatttggcttgttcctgtgaatccagtgctttgtactccgggtcaacagggtacaacgagaattccgcaatttttcgcgcttcgattaacgaaacagcaagtcgctcgatcagttttaccgcgcgaatctcacttgttccaaccatgttggaatagctaataaaccgaacatcacccagatttaatatggaattctttgcttttgcaaattcctcggttctccgaacgcaattgtctctactgtctcgaaccagtttgagtagtttgtcgaagcacttttcatatatgtttttcatgagcggccccctatatgtacaagtgtagcttagaactgcgtaaaggaaaaggcacataacccgaagattatgtgccctgacgctgggaacttagcaaccgctaccactagcgattgcacgattcctggaaataccgattgcataaatcgatacttccttgattgcatcgggttccattcgcagagcgaagatggtaccaatggcaatcacgccaagggccagaacgactttatagtcgacaacggccttaacgtccatagcactacctcctttccagagccacgctctaagaataaaatggtgtgctatgctatcaacgtctttaaaattatatcatgatggcgcagcaatttcaagttgatggaacccctctgcggatttttccgtggagggcgttattttttgcccatttcaccctgacaaatgcggcctttctctgggtatagcgagaaacgctatttctcagaaatgaggcactactatgacggaaatggaacgaaaccgggtcgtgggactccaacaccagggctacggatacaagaaaatatccactctaaccggactgccgctgaacacagtgaaatccttttgtaccaggcatcccgtccgatatgaggatattgccgagcaacaaggactctgccgaaactgtttgaagcaactggagcagacaccacatcgccgaaaacggtatttctgctcggatacctgccgtatggcgtggtggaatgctcaccccgaaaaagtgaaccgcagggcttattacaagctggtgtgcaagaactgcggcgaagagtttgagagctacggaaacaatcgtcgtactttctgctcccgcttgtgctatacacagtatcgtcgaaaggaggcttgcaaatgagcgaatatgaagagaaactttggaactatcaaacagcgatggcaatggctcggcaaatgttgtcccagggcatcatcaccgggaaagagtacgcaaaaatagacgccacaatcgccaagaaatatggggtatcttcgtgtagtatattccgctgaaatcactggataactggggtgtttagaggtaatatgtgacacacgcaaggaggtgaacccatggatagaattataaaacgggtcgatttcccgaaaatcatgcaaccccaggcgttgaaagtatgcgcctacacccgtgtttcttccggaaagaatgccatgctccattcgctttctgcccagatcagccactacagcgaaatgatccagtctcacattggctgggcctattgcggtgtttacagcgacgaagcactgaccggtacaaagagcgatcgggaaggctttcagcagatgctgacggactgccgtgcaggaaaaattgatatggtcattacaaaaagcatttcacgctttgcccgcaacaccgtcacgcttttggaaaccgtccgggagctgaagaacctgggcatcgatgtgttcttcgaagagcagaatatccgcaccatgagtgcggacggtgaattgatgctcaccattctggcttcctatgcccaggaagaaagccgctctgtcagtgagaaccagaaatggcgtgttaaaagaaactttgaagcgggtattccttggaacggccggatgcttggctaccgaatgcaggagggcaaatactgtatcattccggaggaggccgagcttgtgcgccgcatttaccgggaatttctcgacggcatggggcgaaaccgcattgcagcaagactgaacgaggaggggattcagcccaccaggtatggtgaggaatggcatccacagacgatagccaaaattctgcggaattacgcttacacaggtaatctgctcttgcaaaggttcttctgtgaaagccacatcacaaagaaaatggtccccaatgttggccaaaaggcaatgtaccatgccgtaggaactcatgaggccataattcctttggctgagtggaaggcagcgcaggaagagattattcggagagccgagaggcacggttcaaaacctcccgcacagccatccttcttttatactggtcgaattcagtgtgcaaaatgtgggaagaacttccgcagaaaaacgacggcagcacggattgtttggatttgcgccacgctcaacaccaaagggaaaaagtactgcgcttccaagcagataccggaagccacccttgacgaattggtgcggcaggtcacagatgacccttgcagcattgaaaaaattatcgctgatgacggcaacacattgcactttcattttttgggcggcacagtggtcacacgaacctggacagaccgttccagggctgaaagctggacaccggaaatgaaagaaaaggctcggcaacagtcgctggccagaaggaggcaaaaatcatgaacactgcggctcggacggttacggtgataccaccgtccatcacccctatgacccatctaaccaacacacagctttacaaactgcgagttgccgcctacgcccgtgtgtccacggacagcgatgagcagtttaccagctacgaagctcaaatcgactactacacacagtacatccagcgaaacccagaatggacttttgtaaaggtctataccgatgaaggcatttccgggacaaataccaaacgccgtgcaggctttaacgagatgatagaggatgcccttgcgggaaaaatcgaccttatcgtcacaaagtcagttagtcgattcgccagaaatacggtcgacagcctggtcacgattcgaaaactcaaggaaaaaggtgttcaggtctactttgaaaaagagaacatttacacctttgacggcaagggagaactgctgcttaccatcatgtccagtcttgcccaggaggaaagccgctccatttccgagaatgtgacctggggacaaagaaagcgtttcgccgatggcaaggtcaacctgccttataagaacttccttggttatcgcaaaggcgcagacggttttccagaagttgtgccggaggaggcggtcatcgtccgcagaatctattcacgcttcatggaaggattgacatctggtgccattgcaaaagaattgatagcagatggaattccaaccccatctggaaaactgcggtggcagtccagcacagtggagagcatcctgaaaaatgagaagtacaagggggcggcgttattacaaaaatgcttcacagtcgattttctcacaaaaaagaaaaaaattaacgagggcgaggtgccacagtattatgtggagcacagccatgagccgataattacgccggaagagttcgacaaagttcagacggagcttgcgcggcgcaagcagatcagccgccagtacagcggaaagggcattttttcttcccgcatcgtctgcgggggctgcggctcctactttggctcgaaagtctggaactcgacctcaaaataccgcagggtcatctggcaatgcaacggcaaattcaagggtgagcacaaatgcgaaacgccgcatctggacgaggaaaccattaaagcgcggttcgtgaccgcccttaacgctatcatcgaaagcaaagacaacatccttgaggattgccgattgatgcaagccaccctgacagactgtgcaggcattgatacagaaatcgagagtctgcttgaggagatcgatgtggtgaccgaactgacaatgcgttgcattgcggaaaattcacagacggcacagaaccaggaagaatacgccgcccggtacaatgggtttgtagagcggtatgaaaaagccaaggcacggctcgaacagctccgcactacaaaagctgcacgggaagcccagtcagaagccatcggagcgtttatgtttgaggtgcaggaattggatgccctcaccgagtttgacgaaaagctctggctgaccatcatcgacacggtaactgtccacacagacggacgaatggcatttaaattccagggcggcacagaaatcgaggcgtgagtcccaacaaaaatgaaaagaccacaggtttcaacgcctgcggtcttttttcatctgttttccttgagaatactggaatttcatgctataatatatgcaatacactcgaaatacagattatcgttgaatttttggaaactacatatttgtgagtgctgttggttttcacgcttttaatggaacggatctgaagagccattgggaggtattaaagatgctgctgttctctgcattgcttgaaataaacgattccatgtcaaaagatgcgtttgttaagttggttatcgagtggaatcaaggaagcccacatcacgaaaaccgtattccaggaatacagtggaacggcaaatataacattcgctatggctcagatacactttggatgggtattgaagagtatcgcaatcaaaatacaattgctgttcgatacgaaaaaattgaacacgatggcgtcgtttgggatacggactatgtgatgaatttcaatgacatgaaaatgtcaatccggcttgatcgtagctatttagaggaagcattggctatggacactgctttctcaactccacactttattacgcttttaatcgaacatggctatatcaaagatgacgggacgctgccagttcttcgttctccctatttcatcaagtccagtaatttggatgtacttgcggatgttatcaacgggcaagccaaataccgtatgcctgttgtatatgtttcaaagactgctacaggcgtagatcctgtcgacatttggaaactcgctggtcggctgaaaggcgttgctcatgttcttgtggaagaaagccctttgctcaattcgtccatcagaaaattgtgcgccgataaaaatgagtactatggagcgattggagtatattttcccaatagtgcttgtggtcatcggaaatttttgtatcgtgcatatgatggtattgatgccattttggctgaaaaagtaattcgtagcgtcatacaatactgcaatgcacaaatggtagatactttgtacacttggcaaggggttaataacgccctgcttcgtgatagattggatagccgcagtgcggagttgttaacagtcgaaaaggagaaggctcgtgcggccgaagaaacagaccagttactcgaactgggagatgcagatatccgtcgactcaaaaatcaggttgaggagttaactagggctaatgaagcacttgcatacgagaatcaggggctgagagcaaaaatagacagtaccgatgatttaccggtcttgtactttggcgatgaagatgagtttttccccaatgaaattcgacttatgctgttagatgctctcaaagaatctcttccgcggtgtgttcccggtagccgccggcgcgatgtcctggctgatattatatcgaaaaacaattgccagcacattattgatgagcgtgccgccgaactaaaaacgctccttaaaggctataagaatgtaagtggttcgatgaaacgtacattgcaggatttaggcttcacaatcagtgaagagggaaaacactacaagttgacatactacggggacagtcgatatatgattactcttgccaagactccgagcgatggacgctctgggctcaatattgtgacaaccattatcaagaatatgctttgacgtggagatacgctcgaaggtcaagggtgtgacagcgcagaattttgcacccccttaagtcgagaactgcacccccctaaaccgtagttgcacccccttaacgggtttctatcaaaattacggttctttgccataagtccaccgtaatttcgatagaattacggtgggctttttctgtgcctgggaactgtttgaaataagacttttggccgttttggcatataaattaatcctgctgcggagaaatttcgcagcgtgattttcattttatgtaggctatttttgtcataagtgtagcagtaatcgttagatttacgtatattcgttgaatttgtgttgcctctttctggatgaataattcatttcagtcttgaaatatggaattaatttctttataatgaaaatgcgtggataacgcaggcaaaacatatcattagaacgaaatgcgctgatgatttttggtgaagaaagcaaatgggcttctaatgtactccattttacggactgagccgaagttgtattttcgtggagtttgccactccacgtgtaacgcaaaacatagttattcttttgtattatagcacattacatattcaaatgcaattgaatcaacaaagaaatggaagaaaaagtatgtttttgtcaacttacgttaattttttgcggagaattccgttgacttaaagttcagcgcagtcatcccagcagtctggatgaaattaaaataagatccacacccaacataatcactgcacaaggaccaacataatcactgcacaaggaggaattacaaaatggcaaagggtgagaatatcttcagacggcgggacggtcgctgggaggctcggtatatcaagggtcgtgagctatccggaaaaatcaagtatggatactgttatgggaaaacatatcgggaagccaaagagaaagccgcaaagcgcaaagcagctttggcaaatggagctcccttaccgacagccagaacgcaaaaaccgttctccagctattgcttggaatggctacatacaaagaaatgcacggtgaaagaatcgacgtatattaaatacagcgccgcggtcaataagcacatcattccaaagctcggtgtgtgccaccctctgggcttcacgacggaattgatggacgatttcatcaaagaactgcaattcgaagatgaactggcgccaaagacggtgcatgatattctagtcgtgctgcatggcattttgaagttcgcttcctcgaagtttgcaggctcatttcccgcggtggagatcaactatccgaagatcggcaagaaggagatgcgcgttttgtccagagaagagcaggcgcgcctcgttgcctatctacatgaggatctggattcgtgccgatttggtatcttgctggcgctatgtacaggcatacgaattggtgaactctgtgcactgcagtgggaaagtgtttctacaaacgataaagctatccgaattgcaaaggccctgcaaaggctgcatgataccagcgtatcgcaaggtgctcgaacaaggattgtgattggtccgcccaaaagcgatacctccgtgcgaacaatccctatgacggaatacgcaaccgggctttgcaggcgcatgaaaccgcaaagttcagctgcgtatgttctgaccggaacggaagcgttcatggagccgcggacattgcagtatcgattggaaaagtacacgcaggcatgcggtctggagggcgtgcattttcatacgctgcgccacacatttgcgacgcgagctgttgaggtcggatttgaagttaaatcattgtcagaaatattaggacatacctctgtgacgatcacgttggaccggtatgtgcacgcttcgctggaactgaaacgggataatatgcagaaattgaaggtagtgggtctatgatctacgcagtcaaaactagtgtaagtgaatatcataaaaacgggaaaagccttgcatagcaaggctttttcttcgcttttgtagtggagtggcaaactccacgaaagctccgctgacacatctgcattaacaaaagatgttcgtttttatgcagctatggcggaggcggtacttacttgaattgcgcaccttgaatggatatttttgtacagcaatttgcaaattcaatatctgtgtagagcctttgcccctggacggcttcgtgctgaaccgatggggggcagagatacagatatcaatgtagggatgtgagatatgtgacaacaacagcgagcagctgtttgacagaggagcgctctgccgatgtgatcattcaaatagcaaaacctgtattggaacaaaagaagctgtacctgataacgaagcgtgcttttgacatagtatgttctttcttgggcctgctgattctggcaatcccgatgataatcattgcattgatcatcactttggactcgccaggtcccccaatttttaagcaggagcggctcggtctccatgggaagccgtttatgatctataaattcaggtcaatgcgtcttgacgcagaggaaaacggcccgcagtgggcagatgaacaggatccaagatgcacacacttcggccaaattctcagacgcacccggctggacgagcttcctcagttctataacatcctgcgcggcgacatgagttttgtcggcccgcggccggagcgtgcttatttctacggagaatttgaaaaatacattcccggtttctccaaccggttaatggttgttcctggcctgactggacatgctcaggtgaatggcggatattctctgaagccggaagaaaagattatctacgatatggagtatatagaaaagcgatcgatttggatggatttggcgtgtattggaaaaacgatccgcgtcgttttgtgcggcgcggacgcccgataaagaaagatgcgtttggaggacaatcctagaatatgaacgaaagtaagaaaccgtatgcttccgtggggggcacagagctgtcactatgggatattacaaagatcctgttagccaagattcattggctgctccttgcgggggtcgttgttgctgcgggcgtttatgcagtagtaacaatttttgttacgccgacctatgaatctcgagtgagtttttatgtatataacagtgcggacaattcttcacagggaacgatcaataacagcgacctccaggcggcggagagccttgctacgacctattcaaagatcctggcgagcaattctgttttggattccgtcctgagtgatttgagagcagaaacttcattgtcgagaaaggaacttagccgcatggtgaatgtctccgttgtgtcggatacacagttgctggaggtggtagtgacctcgaccgatccagagctttcctgcaagatcgccaattcctttgcaaaagttgcgcctactgaaatcgttcgtattaccaaggcgggcggcgtcgaggtcgtggaccgaccggaggtggcaacggaaaaatctgcgcccagaaccgtatttgacagcgcgattggatttgtggttggcatgatactggcttcagttgctattattctgcgaatgatggccgatacgaccatctacctgccggaggacattgaaaagtccgccggtgtgactgtccttggtcagataccggacatccatgcgacaaatgagaatgctggctgctggaagctggcggagggaggtgcagtgctctatggcgaaaaagaaagaaagccgaaaggtagcgattgaagctgttcgtacaaacaggaaacgtctgctgaccaatgaatctccatttgcgataaaggaagcctatgtaaagttgcgcaccagtttgatgttctgcatgacggcggataaggagcgcccatgtacgagcttcgccgtcactagcgcaaagccctctgagggcaagagcctgacagcagccaacattgccattagctatgcaatgttgggtaaaaaggtgctcttgatcgatgcggatatgcgcaagccaacgcagcgccgcctttggagagtggagaagcctaccggactgtgcgattttcttgcaaaaatatcgaagctcgaactggacaaggtgaaagatctgccgctctggatcgtttgcactggaaccatcccgccgaacccctccgaactgctttcatccgagcgtatgaagcacttcgtggaagaaagtgcaaaggtttatgactacattattatcgacacgccgccgatcaatacggtcgctgacgcgcaaattgtttcgacctatgtggacggtgtggtactcgtagtcaagtccggcgatacgacggaggatgagctgaacgaggccatcgatgcggtacgccgtgcgggcggaaacctatgcggcacggtgctcaacgacctgaatatgaaatccgtgaagtatgcttacaaatataaatatgggggcaaatacggatataagtattcctattctgagtcgtatgaagcgcggtaatatgaagctcgacttgtcgcttgactaccatgcccatattcttcctggctgtgaccatgggagcgatggccttgcgacctcgttgaaacaggtggagatggcagcttctgctggcgtgaaaacgatctgtgcaacgccgcatttttacccgcacaaggagtccgtcgaatccttcctgcgccgtaggaagaaaactgcagggctgctgctccgtgagctgcctgaaaacgctccgctgattcagctcggcgcagaggtactgatctgcgatggcatggaacggctggacggcctgaaccgcctgtgccgtgagggtacaaacgagctgttgttggaaatgccgttttatgcgtggccggagtcgatctgggacacgctgtatcttctgtgtgacctggcggatattcaaattgtccttgctcacgcagagcggtatcctgcagagaatattgaaaaactgatttgtgagagcgtgccgctccagctcaatgcagaatgcctgacaaagccgctgaaacgtaaacggtatcttgaatggattgaaaatggatatgtaaaatacctcggaagtgatatccatatgctgggagatcggtacgaagattggactaaatgccgaagacttctaggcaaataattggagcagaaaggggcgctttatgagcgcagagagatatggagcatattctgtacttatgtcagtctatagcaaggaaaacccggcatggctgaaacttgcaattgaaagcatacaggatcaaacactaccgactagcgattttgttttggtatgtgatgggccgttgactccggaattggatggtgtcatagctgaaaagcattgtcagatgggcgaaatcttaatggtcgtgcggcttgagaaaaacgtgggtttggggaatgccttgaatgaaggaataaaacattgcaggaatgaactggttgcgcgtatggatagtgatgatattgcatatccagacagatgcgagaagcaggtcgcaatcttcaataagtatccgattgtaagtatttgttcaggcacggtaatggaattctcgaagaacccggaaactataaactgcaaaagggtcttgccggagaaaaacaaagaaatcattgagttcgctaaaaagcggaatccgtttaaccatccatgtgtaatgtataaaaaatcggcagtagaggcagtaggctcgtatcagcacttttaccggctggaggactattatctgtggattcgaatgctgatggctggttatgagggatataatattcaagagccgctgctctatatgagagcaggtacaagtatgtataaacgaagggcaggttggcgttacgcaaaaacgcagatagaattgttccgtttcatgtggaagcaaggattcataaatgcttggcaatatgctgagagttgcattatccgaagtagttctgcgctgtcaccgaactggctgcgcaagtatatgtatatgacttttctgcgtagctaagggtgcacatatgagagtactggaacaacatacgggaatgacggctcatcagacacttctgcttgaaatgctgaaagatattgatatcgtctgcaaaaggcgccgaatatcatatcagctttttgcaggcacggcattaggagcagtcagacatcacggcttcattccatgggatgatgatgtggatattataatgtctcgcagtgagtatgagcgttttttcaaggaagcggccaaagattttgacgagactttatattttgcccagcaggaacacagcgctcattggccaatgccctactccaaattgcggcgaaacaatacgacctgcatagagaagtattatccaaaggatttgaagacgcaccaaggcgtgtatgtcgatatcttcccgtgcgataacctctctgattgcactttgatgcggaagatacagttttgtgtatcaaaaatcattattgcaaaaagcctatatgctcgtgggtatgaaaccaatagcgtgattaagaagctattcatgcaggtatgccgcatgttcccgctcaaagggctcaaggcaatttgtatacgaaaaaaagatcagaaatcgcagttagtccatacattttttggcgcagggagcaaatacgagaaaaatatattcccgcgggcatggattgagcagtccgttgagatgcagttcgaggatggagtatttccggtatctgcctattatgacgagctgctgacgaagctgtacggcgattaccacgcgctcccaaatccggaggacagaaagtgcaaagagcatgtcgccattctggatctggagcacccgtatgaagcgcatctgtcggaacttcataatatgcagttcgacgttcttacaagaagcattcgataaatgcgattccggatattttcgaggagataatatggtagaaccgcgagtacttgttgttagtcacaatgttttcagttcttctggaaacatggggaaaacaatgatgcatatgttggctggaatccccccagataatctcgcacaattgtacttccatcaggagattccgactcgaagatgctgtctgcactatttcagaatgacggacagcaatattctgcattcgctgtttacacgaaaaacagagttcagggtctttgatgcatcagacattgatgaatcggcggtgcagagcagaaccgacacaggctggctggcgaaggtatatcagttttccagacggcgtacatcattcatctattttttgcgggacacaatgtggagattcggcaaatggaaaaccaaggcgcttttggagtgggtgcaggcatttgcccctaatgtcatatttttagcggccggagactatgcgtttccctatcgtatcgccatctggctgtcggatttcctgcacattccgattgtgatgtggtgcgcagatgatttctatattgagccgctgaatcatggacctttttttcgtcgaatacaatgccaacagctggtgaagctggcccgaaaggtcattcatcggggcgggactattgttacgatcagtgacatgatgcaaagagattatgcacgcttgtttcaagttccaacaaaaacgatccgaatctcaagtgcaattaaccattactcgctgcctgctgatttccggtcgggtgttgtttatgttgggaatttgggaatcaatcgcattgtaccgctgactgaactggggcgtgcgctcagggcagccgcaataactggatttgagacaatcaatgtatactccggtgagcggaattccacaattcttcaacaaatcaacaagggaaatggattgacttattgcggatgtatttctgagcgagaggttgagcggctcttagggacaagtaagtttattatctttactgaagcctttgataacaaatcaatttgtcgtactaagtattccctttctacaaaaattgcagaaagcctacgaagcggagcatgcattcttgcgtatgggccatctgaaattgcagcaattgattatttgagacgttatcgtgctgcatacatactcgaaaaagcagaagaacttcctaatgcaatacggcatttatgcgaagaagccaatgagtacagtcattatacactatgcgcacaatcattggccgaacagtttcatagcgctgaagttaatgaagaatgtctaagagatattttcgtggaagcaattagtaattataaaactgcggaggtcaaggaatgcaagacgacaaagtgacaagcaaacaaaacaaaatccgaatacgccaaaggaatgcagggatgacatatcgaaaatggatatcagtatttttgtgcgtcatattcgtgtgtggcctgttggccgggtgcggcaatgacaaagtgcaagaagaacagaatgataatgtttctgcaaatacgattccagaagatgtagtcgttcatacggactacggtgatctgcattatccggatcgttggcaggagtatgttaccattcgccaggagcagaacggcaacacgattgcggttacctttgaaaccaagagcggagaagaaacctatgaattgttcaaggttttaattggtgatgacagcagtgaggttgtcggcagcctgacggacgacacgggaacccagcgaaatgtttatctacatgttgaggaactgcctgccgattctggcttggaagagacagagcagacccgcttctacgcaatgcaagaggacttaaattatctgatcgatcatttaagctgaatgtaattacaataggaggagaactgttatgacaagtagactggtgaaacgacatttgtctttgtgccttgttcttgtgatgctgctgacagctatgctgccggtcagcgtcttcgcggcgggctcaaacgatgaaggctctgctgcttccggggggaacgcagctgcaactacgatgatttcagactatgcaacattcctttcctgtttcaaggttctggaaggctatgcccagacctatgcggaagaaaatgccggtgaggatgccaatgcgctgatcatcaactatatccgtacaggcgtggagcggtacacctccggcacttgggaaatggtctgcggcaaggagaatactgcctttaccgcctatgtttccgagcaggataccgcgaacaatacctcggcttctgcactgaagaacttgggcaacttcacattgcccaatggcaataaagttgaccttggccatgtgtttggcgcaatggatgtggccaactatgccaaggcgcaggggatgactgcggctgttgtgcaggcacgtgccgatatgggcagctgggccggtgacatcgcggacctgatgttctgcgccgaaaatgtggacatccccgataaggtggataccacggagacggacgttgacattctggctgccaacattcgtacaaaatacctcggtgtagattacggcacactcaacagtgtgggtcactccttcactgatacggacctctatggcgacatggatgcgttctatctcacaacggagatgaaccgcggcggtgtggcgttgagcacgatcattgagaactactttaccgcagggcttacagacgcaagccgcgcttcctacttcctgaccaaccgtctgggcggcatggtcaccaaagacggtatccggagcaaggttctgagcacctataccgggaataccctgatcggtgcgctggagagctcgtactcgctgacagatctgcccaattgcgagacgctgcgcaaggcctgctgctatgcatttgcggattatctgtttgatctggctggcgatcccaacggcacggatcccgttgatcccgacccggtcgatccggatcctaagcccgagccgaagccggataatgcctactattctgtgttttcttcggacacgacgacggtcgcgcccggtgtgacgcagacgatcaactatgcactgaccaaggacgacaagcagatcgtctactacattgccacggcggatatcgcccgggaggatgtgagcatccacgccaattatcacgacaacgatccgagccagggctgggcaatgtcccgcgtgtccgatcagatggcggcggctcagaagcggcattccgatccgtccgatgcggcaaactacgtcgagcactacaatgcagtggtcggtgtcaacgctgacttctacaacatgaccaccggtgcccccagcggcgctctggttatggatggtgtcgagtatcatggcggcacctccaaaaacttctttgcgatcctgaaagacgggactgccatgatcggcgggcccagcgattacgcagcttatcaggatcagatccaggaggctgtcggtggcagcgtttatctggtcaaggatgggaagcctgtcgtgaccagtgcggcggactattataacagccgtcattcccgcacttgtgtgggtatcactgctgagggcaaggtcgtcatgatggtgctggacggccgtcaggaacccttctccgctggcggcactgctgaagaactggcacagatcatgctggacgcaggctgtgtgaccgcaatcaatctggatggcggcggttccactaccttcgtagcgaagcaggaaggcagcaatacgctcacggttgtgaaccgtccttcggatggttatgagcgttccgttagttcctctctgatggtggtctccacggcccctgtctctacggagtttgatcatgccctgatcacctctgcttacgattacttgacgagcggcgccgcggttcgtctggttgcttccggtgtcagtgtgtccggcagcgctgcggaactccctgccaatcttacatggaagtccgcagatgaaaccatcggtaccgtctctgaagatggtgttttcaccgccgtcaagaaaggcagcgtggaaattcagctcctgtccggtgacacggtgatcggcagcaagacgcttaccgtggtcgagccgaatggactgaaattttccaagacaagcatcaacgccatctacggggattcggtgcgccttcccctgatcgcaacctataatgagaatcccgtcgctgtatgcgcgggcgatatcacatttgaactgagcaacagcgcagcaggtactgtggaagctgcgaacaatggctttgcctttactggcagcgagggatccggtctgcgcaacgttaccattacggctatgatcacgcgggactattccatcagtgccacgatcaaggtcgccatgtacagtgccaatcaggcgattttcgactttgacaacgccacaggcggcgacagaaccttcgcatggacaagagaagtctccaacgcggaatatctccccggcggcgacggcgagacagaccgctatcatgtgatcgatcccagccagcccatgaacgtcacctatgtcttcggactggatatgatgacgatcaagatgcctgaaaagctggagccgcttctgtccatggttgctggcggcgatatttccggcatcacggcctgggatctgctgctccagctggcagagcgtgtcagcccgaagactgaggtgacggtgaagttccagttcgaccagaatgtcgatgtggacatttccaacctgacggtgtcgaatgattatttccgtctgacgtccgcatccatggacgagaataatctgctcacggtgaagtgcaatttcatcaagcagagccaggccattgatcctgaaacggccaaccccatctgcattctcagtggtgtaaagatgaccgctaagaacggcgcgaatcagacgctgacaattacgaacgctggttcgatcggctatgatatctatcttggcgcaaacgcgctctacagcatggccaagcagacctctttccaagagcaatatggtatttatccctatgaggagccggaaaatgtcacacatcccaagggcggccatttttactgcgaatcgtatcagaaatttacggataagttcattctggatggcacagtctggtccggctggaagcagatcaacggcgcaacctactactttgtggataacgtcgctgtgaagggcgttcacaaggtccctggtctcaacgatgaaagcaacgagtatttctaccagttcaatgagacgaccggtgcttgcgagggtaaggtcacaggcctgttcgaacttgacggcgcacggtattacgccatcaacggtgtggccaagtctggctggtggaacctgacggatgcagatggtgagaacagctattattactttgataaagagacattcaaaggactgaatggcccgagtagagcattcttcgagaatgtgacgtacacgtttgataacggaaagctgttgaagggagaatggctgacaaccgatcaaggaaccaagtattattatgggccgacattcgtacagggaaaatggtatacggttgaaggcgaaaagtactatttcgacccgcagggctatcgttatacagggcttagatatgtgaaagaaagctacaatcacgatgatcatatctactggtatgactttggcgaagatgggatttgccacggcgtatatcagcacacaggcctcttctatcttaacggaaatacgtactacaccatcgacggaatggtctgctttggcctgtatttagcggaagatggatactactactattttggaagtggcaattataccgctgttaagaacacccgtcactgggtatccttcccgaatgacactggtcttgcacaggcgttctacgattttgacgaaaacggcaggatgattattgataatccggatccgagcaaaaacggcattgtcaacgaagacggtacgctctattactacgtgaatggtgtcaggaactatgccggtctgattcaaattgacggtgactactattacgtgaacagttcctgcaaagtagtcacgagtcagcgttactgggtatctaagaccaatgatctgcttcctgccaccttctataacttcgatgcagacggtaagatgacggatgcaccgattccgacgccggatcctgacccgaatcccaatcctgatcccggggtgaagaacggcatcgtcaacgaggatggcgagctgtattactatgtcaatggcgtcaagacctacgcgggcctgatcaagatcgacggcgattactactatgtgaacagctcctgcaaggtcgtaacaaattgccgttactggattagcaagaccaatgatctgttgcccgcaaccttctataacttcgatgcagacggcaagatgactgatgcacccattccgacgcctgaccccgatcctaatcccaatcctgatcccgaggtgaagaacggcatcgtcagcgaggacggcgagctgtattactatgtcaatggtgtcaagacctacgctggtctgattcagattgacggcgattattactatgtgaacagctcttgcaaggttgttaccaaccagcgctactggatcagcaagaccaatgatctgctgcccgcaaccttctatacctttgatgcagacggcaagatgaccgatgcacccattccgacacctgaccccgatccggatcccaatcctgatcccggggtgaagaacggcatcgtcaatgaagatggtgagttgtattactatgtcaatggtgtcaagacctacgctggtctgattcagatcgacggcgattattactatgtgaacagttcttgcaaggttgttaccaaccagcgctattggatcagcaaaaccaacgatttgctgcctgccaccttctatacctttggtgcagacggtaagatgacggatgcaccgattccgacgcctgagcctgatcccgagctgaagaatggcatcgttagcgaagatggcgagctgtattactatgtcaatggtgtcaagacctacgctggtctgattcagatcgacggcgattattactatgtgaacagttcttgcaaggttgttaccaaccagcgctattggatcagcaaaaccaacgatttgctgcccgccaccttctatacctttggtgcagacggcaagatgaccgatgcacccattccgacgccggatcccgatccagtcgatcctgcaaagaacggtatcgtcagcgaggacggcgagttgtattactatgtggacggcgtcaagacctatgctggcctgatccagatcgacggcgattactactatgtgaacagctcctgcaaggtcatcacgaaccagcgctattggatcagcaaaaccaacgacctgctgcccgccaccttctatacctttggtgcagacggcaagatggtcaaataaccaaaagacccatggggtatggtgattttagcgccataccccatggaagatacgaatacgaaaaggagtacgtattgcttgatcttgtatttatctggctgaaggagcattcactgatcgtgctcctgcttctgggaactatcttcaatgtgttctggctgtacaggatgcggcggcaactccaaatgaaatggtacgccgtgatagcattctcggtgctgcatacggtatgtggtgttttgagtgtaaaagcatttgcgtttctggaaaccggagatgctggcaacatgagcttattcggcggagtgttctttatgccagtgctttatttcatcagcgcaaaggtttcaaaacgcaatatcaaagccgtttttgatatttttacgatttgcatgatcttcacggtgatgtgcgctcggatcaactgcatcgtctctggatgctgctctggcttagtcataccgggaacgcacgttcacttccccacaagggaactcgagatcctctattatattgtgatgttgattctgctcatccccagagtgaaaaagagcaagaaccccggcagcatttacccgttatatatggcatcctatggagcgttccgcttcattgatgaattcttccggacgtcctctacggggatgctgttccacctctctcatgtctgggcagccatcgcatttgcggcgggactcagcatttatatagaatcaagcatgaaaaataaaaaaggaaagaaggtaacaaagaaatgaaggggacaatcaagcggtttacttccctcatgctggcgttgctaatgacactggcattattgcctatggaagtattggcagctgagaatgtttcggatttcacacaactcacagaattgacaagcgaagctcaaatagcttcaactcctgcaattcagccattggcagacgcggccacagctgtgccggcgacattttctgtgggcagccaaacctattcggatctgaatgacgctattacagcggctcagtccggcacggataagaccattgttgtagcaacggatggctcgctgtccggcagctataccatccccgccggtgttacgctgctggtgccgttcgatgatgctaatacactgtacaaggaaacacccacggcaaccagaaaggcggcagcggccaaagcataccgcaagctggtgctggctgccgatgcggctctgacggtggagggcgccatcagcgttggtggtcaatactactctgctggtggcagtcagattggaggaatggttggcaattatggtcacctctggctgaacaccggcgctgcgatcaccgtaaagagtggcggtgcgctgtatgcgtggggctttgtttccggcaacggtgcagtcgccgctgagagcggtgccaaggtatatgagtggttccagattggcgacttccgcggtggacgtgcaacaatgtgcatgggcaacaatgtatttcctttttcccagtatttcatccaaaacattgagtctcctttaaccatttattcaggtgccgaagaaattctctatacagatatctatgcaagtgacagccaaaatggtgcttctgtcacctttatcggaaacagcggcatgtttaaggtgctttccggcagcctgacaaagcagtacgacgctgcccaggatcgcatggtttacacagtagacggaaaggcagagttgaacagtttgagtatcaactctggtgcgcttagagtagattcttccgaatatgtattgcccatcaccaacaatatgaccctgcacatcacgccgcgcagcagcatcaccaccaaccaggacattgcgctcctgcccggcgtgcaggtatatgtggacaaggcggcggagctgacgatcgctgcgcgcaagaaggcgtatatctacgacagcgaccagtggacggaccagaattatgtcaatcccaacgcgaagttcaaatccgtgttatattctcccacgaaaagctatacgcgaaccaatgccgatctggtggacgcccttgtggatgtcaacggcacgctcattgcggccggcgcgatctacaccacaaaaagcggtgcggacgtatgctccagccagaagaccggccgctatattatgaaggcaacctctggtaccgagacaatcacctatcagtatacacaaagcggctcgaacgtaacttctcatgatatcggtatcgacccgatcagattgaaaaatgacgacggaagctatacggacaccaaaggtgcggcgcaggatcagtataacttcgaggttgacaagtggctcaagtgccagcgccttctggtgatctttgatccgaactacaccggcgcaccggagatcgaggtgcagaaggtcgcgccctccacggatacgccgctactctccaacccgttcacccgcgagaactatacgtttaacggctggaataccgcagccgacggcagcggcacctcctatgcagatggcgacaacatcaccctgacggcggacaccaccctctacgcccagtggcgatgcagccatgcggtcactgaggtgagagatgccaaggacgccacctgcaccgcgcccggctacaccggcgacacctactgcaccgtctgcaacgagatggtgaagaaaggcgaggtcatccacgccaagggacacaccgaggtcattgacccggccgtcgagcctacctgcaccgcgcccggcaagaccgcaggcgcgcactgctctgtctgcggaacggttatcaaagcgcaggaagagattcccgccaagggccacagatggaatgagggcgagatcacgaccgcccctacctgtgagaacgccggtgtcaagacctacacctgcacagtttgcaatgcaaccaagaccgaagcaatcagcgcgaccggccacacgcctgttcagatccccgaaaaaccggccacctgcaccgagcccggccataaggccggtacgaagtgctccgtttgtaaggcaatcctctccggtatggaagaaatccctgcgaccggccacacagaagtaatcgatgtagcaaaggctccgacctgcacggagactggtctgaccgaaggcaagcactgctctgtctgcaacgaagtcctcgttgcgcagaaagtgatccccgccaagggacataccgaggtcattgatccggcagttgagccgacctgcaccgaacccggcaagaccgagggcaagcactgctctgtctgcaacgaaatcctcgttgcgcaggaagtgatccccgccaagggacataccgaggtcattgaccccgcagtcgcgccgacctgcaccaagaccggcctgacggagggcaagcactgtgatgtttgcaaggaagtgcttgttaaacaggaggtagtccctgcgaccggccacaagccggagattcgcaatgcggtcgaagcaacgcttacgacacccggttacaccggcgatacgtattgcacggtttgtaatgagcttatcgcaaaaggcgaagtgatcccgtgcccgaccggctggcttgagagcgggcagggcagacagtattacaagaacggcgaactgcagaagactggttggaccgtcattgacggcaatacctactatctggacaccgaaaccggatacgcggctaccggaatcgcgacgctggtccccgatggagcaacggaagaagcccgctgcgtctttgacggcaagggtgtgttccaaaaagatgttaccggtgtttacagcgtcggaaatgatacctattggctcaacagcggcatcatcgaggaagaagccggcctgaagcgcgttgtcaaggagaacggcgaggtcaactattattacttcgcggttcagaagaatctggaggagcgtgagggcctgaccctctcggcggcggtgaagagcactgtgctgaacggcaaggattgctggctccacaagaccaatggccttgcgcttcctgaatggggctactacttcgatgagaacggtgtcattctgcacgacgaggacaccggcaagaacggaatcctgaaggctggcgaagatctcttctactatgtcgacggcatcaaggctcctgcaggtatgatcaagatcggtgacgattactactatgccaacagcaagggccagctgatcgtgaaccagacctactactgctccagaatgaacggtctgatggaggaaggaacctatgcctttgacgcaaagggcaagctcattccgggtgctacggacaagaatggcatcgtgaaggacgatgacggcgtgcttcgttactatgtcaacggcaaggtaacctatgttggcctgattgaaattgacggtgatttctactatgtccgcagcagcggtgaggtcgtgaacgattgtgtgtactacatttcctggacgcatggtctgaaggaagccggctactacacgttcgatgagaacggaaagctgaccggcactccgaagaatggcatcgtcgaggaagatggtgttctgcattactatgtcaacggaacactgacctatgcgggcctcatcaaaattggcgatgattattactatgtgaattccaagtgcgaagtggtacgcgattgtgattactacatttcctggacgcatgacctgatgccccagggcagatatcacttcgacgcagatggcaagctgacaggcagcgtcgcacctctgaaaaacgggatctacgaggaagacggaagcctgtacttctacaggaacggtgaacgtacctatgccggtctgatccagatcgacggcgactactactatgtgcgttccacctgtgaggtcgtccatgaccgcagctactatgtgtactggacgcacggcctgatgccggagggatattacaactttgacagtgctggccggatgattctggacagcgaaaccgagtaaatacactggaaccgccggggcgcaccttggcgcctcggcggttctcttttatcacacaacatcggagatgagaaggatgaaagtgctgtttgtcaatttggtatatgggactggaagcactggaaaaatcatcgctgatatcatgaacctgctgaaaaagtatggcaatgatgtaaagactttatacggtacgggagcatgctccgacaatgcggacacagtgaaggtgtctggaaagctggagtattactttcacaatgcagtatcacgattcacagaccatgcgggactatattcctgggcggcgaccagaaagatgatccgagaaatcagagcgtttcagcctgatctgatccatctgcacacgctgcacggcttctatgtgaattacgagatgctgttccgctttttgaaggaagcgaatattcccgtcgtttggactttgcatgattgctggacttttaccggccattgcacacatttctcgcaagtcaagtgtatgcaatggcagaccgagtgccgggactgcaaattgctgtaccggtatccgcaatgctattggaaaggcgatgtaaggcataacttccttcgcaaaaagaatgcctttaccggtgtaaaaagtctgaccatcacaacgccctcgcaatggcttgcggatcaggtttcacagtcgttcctacagaactatccgagaaccgttattcccaacgggattgaccgcacgattttccgcccacagtccagcagcttgcgtgaaaagtatcatctggaagataagaaaatcgtcctcggggtagccaatgcatggaatgcacgcaagggattgccagacttgttgacgcttgctggccgcctcggctctgactatcaggtggttttgattggcctaatcgaaaagcaactgccgaatattccttccaatgtgcttgggcttttacgcacggcaaatcaaatcgaattggcgcaatggtactctaccgcagatgtgtttgtgaaccctacctatgaggaaacctttggcctgactacggtagaggcccaggcatgcggaacgccagtggtggtatacgaaacggacggttgtcctgaaacggtagcaccgggaaatggacgcttgattccgcagggcgatatgcaggcactggagaatgccgtgagagacgtggcagacagcaactggcgtgcggaccctaaaaaaatggtgcgttttgacaaggacacggtgtatcaaggctatgtcaaactctatgaaaatgttttgtctactttgggaaaagggcgtgtgatggccacatgagaattcttttttgcagtaactactttacgcatcatcagatccccctatccgatgccctctatgaattgacaaatcacaactattgcttcgtggcacataaagagatggatgcagagcgaaaggacctcggatggggaaatgatttggtgcgtccatatacctgttcggcatcagaccaggaggttcagaagcaattaaatgatctggatgttttgatagcaggttcctttccagagcgtcagacaaaggaatacggcaaaaaggccaaattgtttttccgatattccgagcgaccgctgaaagctggaaatcctgttttgaaatatataccgcgatttctcaagtggcattattacaatccaccttggcggaagacatatatgctctgcgccagtgcctataccgcgggggattatgcaaaattcggccttttccataatcggtgctacaaatggggttactttccggagacgatccggtatcccagcattgatgacttgattgaccgcaaagcaaaagcaaccattttgtggtgtggacgctttctggactggaagcatccggacgatgtgattgaggttgcaaagagactccatgaggcaggatgctgcttcaaaatcgagatgatcggtaccggtgagatggagcggcagctcaagcaacaggcttcggaagctggacttctggatgaaaatgtacggtttcttggggccatgtctccggaagccgtgcgtcgtcatatggaaagcgcaggcatctacttattcacaagtgaccgccaagagggctggggcgctgtgttaaacgaggccatgaacagcggctgtgcggtggttgccagcgatgcagcaggggcaacaccttacctcgtaaatgacggcgtgaatggaagcgtttatcactccggcaatattcaggagctttatgaaaaggtacgacggcttcttgaaaatacgactatgcagtatagctttggaaaagcggcgtacctgacgattacagaattgtggaatgcagaggttgccgcaaagcgatttttgcagctatcgcaggcacttttgaacggcacagacgcttccggcttgtttgcgaacggtccatgcagcctcgcaaagccgctgcgggaggactggtatcaaagatgaagttgaagactatcaaaaaacgaattgtgatttaccttgtcaatcatgtcttggccggaacacgttttttccccgcaaagaggagccttcttcgttccatcggctatgagatcggagaaaataccaaaattgtcgggccgattcataatacagggacgctccgcattggtgcgaattgttggattggatgcaatctcactgtccatggaaatgggacagtgacgattggagataactgcgatattgctccggatgtcaccttcctgacaggtggacaccagatgggcgaccatagcaggcgggctggaaaaggcgaatcctatcatattacagtaggcagcggcgtatggatcggtggtcgggttacgctcctattgaatacgagcattggggatggaagtatgatcgcagcctgtgcctgtgttcctaaagatgtgccggcggatacgatggtggccggtgtcccagccaaagtgatgaaggagcttgaagattttgctgcagtcgctcagaaagaataaagtcgttaaaaatgccggatggatcatcggtggcaaagtggcgaacaagctgctggcctttgtcgttggtatttttgcggcgcgctatcttggcccaagcaattacggcctgatcaattacgcggcggcatatgcggcattctttgcctcgctctgtacgcttggcattaacagcgtgatcgttaagaactttgtggatcatccggatcagcagggcgaaacaattggaacgaccctgctgctgcgggcgatctcaagtctgctgtctgcgctggcaatcatcggcattgtcagtgttgtggacagaggggaacgtctcaccattgtggttgtggcgctgtacagcattggcctcatttttcaggtgtttgataccctcaactactggtttcaggccaggctccagtccaagtattccgccattgccgaactcgtctcgtatgcggcaatgtctgtgtacaaaattattttgcttgcgcttgggaaaagcgtggaatggttcgccgttgcaagcgcattggattacatcgtacttgcggtgtttttgctgattgcttatttcaaaaatggcggaacaagattccgttactctctggaaaaagcaaaggagcttctgcaaagcagcggcagctttatcatagccgggctgatggtctccatctatgcttgtacagataagctgatgcttaagcagatgcttggcgcagatgccgtcggacattattcacttgcttcgacggtcagcgtttcatgggcctttattctctcagcaatcattgattccctttatccggagatcgtgcagagttttcagaaagaccgcctgcgctatgagcggaagaaccggcagctctacgcaattgttttttatgtgtccctgttcgtatccgcaatgatctgccttgtcgcaaagccttttattttgattctctatggagaaaactatctgccggcagtcgggcctctgcgcatcgtggtttggtacacagcgttttcctaccttggtgttgccagaaatgcatggatggtatgtgaaaacaggcagaaatatctgaaatacctgtatgtcagtgcggctgcacttaatgttgtgctgaaccttgcgctgatcccatcgtggggagcatctggagccgctgcggcctcgctaatcacccaggcttcgacaacagtgattcttcccgcaataataaggcctttgagaccaaactgtagactgatgcttgatgcagtactttttcgcgggatttttccaaaaaagaatgaaagcacagcaaggagaaattggagatgagtgttcttttcggcaaaagaacaaatgccgctaatacaataactattgtggggctgttcctcttttcggtcggtgccttcaatcttcctggtcaaattttcttcgcattgactctttacttttttatatggaaatcgaaaaccattgtcattgaaaagcatgatgttattctcttgcttttttcgacatcctattttgttatttatacttttaactttggatttgcggtaaaaagtctaatcatatatctttggggaccttgggcagcctacttgttcggaaagtggtttgttttatctgataatagcgaccgttcgtttcaagaaatgacgaatacgctaacatttggtttctttctgcacggcgttttgaatctgctcgcatatcttaaatcagactactatgcgcaatatgcttatcaaagagtgtccgtcgatttttggcgtggtgacatggtttcagttatctctacggggtttatgttcacatttgcggttgctctttcaacttcaatcctgttctcccattgcggggttcgaaaaaagcttatagcgctggcggttctattgatgagtacgtttgaagcatcgttctttgcctatcgaacgatgatattcattgttttaattcttgttgcttttaacctacttcgttggcttcatgactcatctgtgcgaatcagcagaaaagctttgctcattgggcttgccgcgctcttttttgttgcgatatttgcaattgtgttcctgaatgctttcggaattcaagatgaattgctgtctttgaaaattgtacggcgactgctatacggtgacaaatcttcgaggtttaaaacatggacctcatatttgttttcgggggattggcttcgttatccctttggaggccagaagagtgaattcgcatatcacggagagtgggtacacaatctatggcttgatattttaaataaggttggactgattccctttgtaatcgctgtaatatttacgataacgagcatacggtctgcatatggtgccgctgtgcgtatgaaaaaagcaaaccacaatttgctatcaaatcaaattgcaagtttaggtttaggtgcattgctgatctgtatgcctgagcctgttgttgatgcaaatccgtattttttctttgctattctaatgctattgggtggcatcaaaggagtggagtgctcattcggcaaggaagataccgctgaatcggaaaggggattctaaagacatgtctcaattcaaagataaaatactgctcattaccggtgggacaggctcctttggcaacgctgtgctgcgccgcttcctgaccaccgacattgcagagatccgcattctctcacgggatgagaagaagcaggatgatatgcggcatacctatcaggagctgtatccgcagtatgcggaaaagatcaaattctacataggcgatgtgagggattacaattccattctgaatgcgttccgcggtgtggactatgtatttcatgccgccgccctcaagcaggtaccctcctgcgagttttaccccatggaggcggtcaaaaccaacgtggccggttctgacaatgtgatctccgcatgtgttacaaaccatgtgaagaaggccatcttcctgtccacggacaaggcggcctatcccatcaacgctatgggcatgacgaaggctgtcatggagaagaatgtgattgcccgttccagacagatgctgcctggagatccggttctgtgtttgacgcggtacggcaacgtcatggcttcccgcggctcggtcatcccgctgttctgcgaccagatcgacgaggggaagcccttgacgatcacgaatcccaatatgacccgttttatgatgacgctcagcgatgccgtagaccttgtgctttatgcctttgagcatggcgaacagggcgacctgttcgtgcagaaggcccctgctgcgaccatcgagacgctggcacaggctgtgctggagctgaagcactccaaccttggcacgacgatcatcggaacgcggcatggcgaaaagctctttgaggtgctggtcactgcagaggaaatgatgcgggcggaagagctgcccggcttcttccgcattccggcggacaaccgggatctgaactatgacaactatttcagtaaaggcaacccggaattcggcaagatcgagcaatatacctcacacaatacacaccggctgaatgtggaggaaatgaaacagcttttgctgaagctgaagctgttcggaggaacttgctgatgaatgtactgatcaccggcgcaaacggatttgttgggaaaaatctgacgcagcgcctttccgccatcaaggatcacagagacaggactcggcccgcactgcaaatcgaggaaattctcttgtgtacgcgggatacttcggctgaaaccctggtgggctactgccaaaaggcggatttcgtggttcacctggctggcgtgaaccggccccaggatccgggagaatttgcagccggaaacacggacttcacccgtaccctgttggagatgcttcgggaaagcggcaaccgctgcccagtgctgctgtcttcctccattcaggccagcctgaccggacgatatgccgaaagtccctatgggcagtccaaaaaagcggcggaggagctgctcctcgcttacggcagagaaaccggtgcaaacgggatgatctatcgtctgccgaacctgtttggcaagtggtgccgccccaactacaattcggtggtggcaaccttctgccatcatatcgcgcgggatctgccgatcaccgtttcagacccggcagtcgaattggaactggtctacattgacgacctgatcaacgagattctgaacgccatggaggggcatcccaaccggacagatggggcgtattgcagcgttccggtcagtcatcctgtgacgctgggcgagatcgtccgtctactccgaacgttccgggagcagccgcagacgcttttgctgccagagatcccggatggcagctttgcaaagaagctctatagtacctatctgtcctatctgccgccggaaaaaattgcgttcccgctaaagatgaatgtggatgagcgaggcagcttcacggaacttctgaagaccgcctcctgcggacaggtctccgtcaacatcataagaccgggcgtcaccaagggacagcactggcacaacagcaagtgggaattctttatcgtcgtggccggacacgggctgattcaggaacgtcaaatcggctccgatgaaaagatcgaatttgaggtcagcggcgaccggatccaggctgttcatatgttgccgggctatacccacaatattatcaatctgagcgaaacggaaaatctggtgacagtcatgtgggccaacgagcagtttgaccccagccatccggatacctactttgaggaggtgtagcaatgggaaagctgaagctgatgacgattatcggtacgcggccggaaatcatccggctgtccgccacgataaagtgctgcgaccggtactttgagcagattctagtccacactggtcagaactacgactacaccctcaatcaggtgttttttgacgatcttggccttcgggcaccggactattatctggatgctgtaggcgatgacctcggagccacgattgggaatatcatcgagaagtcctacaagctgatggtgcgggtcaggccggatgcggtgctggtcctgggcgacaccaactcctgcctttctgtgatcggcgccaaacggctgcacattccgattttccatatggaggcgggtaaccgctgcaaggacgagcgcctgccggaggagacgaaccgacgcattgtggatattatcagcgatgtaaatctctgctattcagaacacgcacgccggtatctgatggagtgcggcctgccgaaggagcgcacctttgtgaccggcagccccatggccgaggtactgcacgccaatctggacaagatcgaagcgagcgatgtccaccagcgtttgggactgactaaggggcagtacattctgctctcggcccatcgggaggaaaatatcgatacagaccgcaattttgtccagttgttcacagcggtcaatgccatggcagagaagtatgatatgccaatcctttactcctgccaccccagaagcagaaagcggctggaggcgacgggattccagctggacacccgtgtgatcgcccacgaaccgctgggcttccttgattacaactgcctccagatgaacgcttttgcggtggtttccgacagcggaacgctgccggaggaaagcagtttcttcctgtctgtcggtaagccattcccggcagtcagcatccgcacctccactgagcgtcccgaggcgctggacgcgggctgctttgtactcgccggaatcgacgcagactccctcctgcaggcggtggagatggctgtcgggatgcagcgggcggaatgctttggcacaccggtagcgggttacactgctgaaaacgtgtccatgaaggttgcgagaatcattcagagctacacgggcatcgtcaataaaatggtttggaggaaagacgaataaatggcgcttgcagataatcacatacactttttgcttggagtggatgacggtgcgaaagacgaagaagtaatgcacgccattttagacgtggcatagcaaaaggaccaaagggggagatacaaacaagggagctgtatatggggaagtgcggttggaaaaggcaactgcgtatcccgttctccggctttacaacatttgccggggtgtggtatcatgcggacagaaacaaatctgcaaacgaggggggacgcctgtgtcagacgccagagaacaaccggcggcgcagccgccaaaaaaacgcatgagcagcggcacgcgtgtgctggtcatcatcgtgtgcatcctgctagccattgcgctgatcctggtcggcacggtgctgatcctgtcggcggtcggccgcaatgcgctgacgaacgacgacggggtgaacattgcccgcgatgatgtggaggcgcttggctctggcacggtgcgctacaacgggcagctctaccgctataataccgacattgtcacgatcctgctcatgggcgtggacgaggaggtcaagcaggatgccgacggcgtctatggaaacgcaaaccagtcggatgcgaatatccttgcggtgctcgacatgcgtaaccaggagctgacgcttgtgtccatctcgcgtgatgcgatgtgcacgctggacattctcgacagcaccggcgcacacgtcggcacggccacggcgcagctggcgctggcctattcctacggcgacggggcagagcgcagctgcgagctgacgagcgcggctgtttcgcgcctgttttatgacctgccgatcccggcctacggatcgatctatatgcagggtatccgccagcttgtggacagtgttggtggtgtgaccgttacgccggatgcgagcttttccggtttcaccgccggacagcccgtgacgctcaccggtcagcgcacggagaattatatccgctaccgtgccgactcgaccgagggcaacaaccagcgcatgcagcggcagaagcaggtcgtgctcgcgctcgtgaacaagatgctcgcgcaggtcaaggaggacccggcgagcgtgctggcgctctataacgatgttcggcgcaatatcacgacgaacatcaacaccgccatgatggtctatctggcgcagcaggcgagcgggatgcacttctcgggcgatatcgtcaacgtgcccggcacatcggttatgggcgcgcagaagcacgcagagtatcaggtcaatcccgatgcgctgttggagatggtcctggatattttctacgagccggtggatggttgactgaaaacggttattttttgaaaataacccttgcattttacaccgtttcggtgtaaaattatgctactattagaagctgtaagtttatgaatggaggagttacacaatgaagcgttttgtggccattcttttgatactcgtgcttgtgtttgcactgtcggcgacggcgtttgctgccagtaatgttaccagcccggagaagggcaacacgaatccgaatgtcaatcccgattccggcaagacctctccgcagaccggtgagtccttcagcatcctgtgggtgatcttggcggccgttgctgcggtcggagcggtgctgttttgcggcaaaaagctggttcgcgccaagtaagatggcataactatgataacaaagctccatgattcgttcatggagcttttgttttatgaggtgaacgatgaaaacgaaaaagatccttgtgcgcagtgtgctggtgcttgtggcgctcgcggcgctgtgcgcgtgcgcgtggtgcgtgtggtacatcattcagtactatcagggccagtccttcggcgaccggatgcgcaccaacgccccggacgacaccggcagcttccagcttggacgcgtgaagatcccggtcgatttcgacgagctgcaggccatgaacccggatatctacgcctgggtgacgatcccggatacggacatcagctacgctgtgctccagcgtgacggcgatgatgatcaggagtattactccaagcacagcgaaaacggcgcgtactacagcggcggcagcatcttcagtcaggactataatcaaaaggacttcagcgatcccatgaccgtgctctacgggcataacctgcgcaacggacgcatgtttgcccagctcaacgacttttcggatgccgaggtctttgaggcgcaccgctatatctatatctatcttccggaccggatgctcgtttatgagatcttcgcggcctatccgcattcgaacgagcacctgctgctgtgtcacgactttgcggatgcggacgatttcacggcgtattttgacggcgtgcaggcgcaaaagagcctgcaggccaacttccgcaccgacgcctggcccgaaccgggcgaccgggtgctgacgctctcgacgtgcttccggggcgataaccaccaacgctacctcgtgcagggcaagctcgtggcggaggcccacgccaaataactgcatacgaaaaggaaaacccggcagagcaaatgctctgccgggttttgcatccggaagatcagccgtgcaggccgttttcctgacgctccatgttttcaatggcaatgtcatgaatctgctatatgatagcgactctgactcgataaatcaaatgaagtctgggttactgggacgcgggccgtggaaagtacactttccggaaaaaccatcgttggcagcggccatggcattaaggctatgatacgctgcagcttcataatccttgtctttatgagcatagtttttatcttgttgacagtcttttctttgacaatggaatcatcgctctggattcctttccttttcttttttaacagatgtttcttttcgaccgaagcgtttgggcagattcacaggatttctggagcagaaatcctgctgtgcctccgcatctgggcacagtaagggagtgctgcttcttggggaaaaatatcggcacaaaaaccaccgcatccccgttgatttgctccgcgaaatgtgttacgctctcagtgctggaagcccggcactggccgggaaattttcgtttatgggaagacaggtatggactattatcttcttgcggatatgacggtgcagatcggctacgagctcgcggtcgccggggcggagacgtaccgggtcgaggagaccatgcgccgtgtgatcgaggcatatggcacggagggacaggcgtttgccatcccgaactgtgttgcggtgagcttcgtgacgccgaatacgaagccgctgaccatcatgaagcgcgtgggctaccatggcaacgacctcgagcgcattgaaaagctcaacgcgctcagccggcgcatctgcgccgaagtcccggagccgcaggaggcgcagcgctggctcaaagagacgacagccgccgtccgcagctacgccgtgtggatatattacctcggcaatttcatggcggcggcgggcttttgctgcgtatttggcggcacggtgcgcgactggctctgggcagggctgagcggcctgatcatcggctttgtgacgcgctgcatggaccggctggaggtcaacccgtttttcagcaccattgcggcgtcctttctcatggcgctgccggcgtatgtcgctgccggcctcggctggctcgactgcgtggcggtcgtcatcatcggcgcgctgatgctgctggtgcccggactgctcatcacaaattcgatgcgcgacatcatctacggcgacacgagctccggcgtcagccgcatcgtgcaggtgctgctctcggcgttcgccatcgcgcttggcacggcggcggcgtggcacgtcacgacgccgatctacggccatgcggaggcggccgcagcgctgacctatccgctctgggcgcagggtctcgcgacgtttgtcgcctgccttggatttgtgatcctgtttaatgtccacgactggggcagcgttttgtgcgcgctcggcagcgcgctgacatggatcgtgtacctgctgtgcagcagggccgggttcagtatctacagcgccaacttcttttccgaggtcgtggccgccgtgtattccgagggcatggggcgctggcgcaagtgcccggtcacgtcctatctggtcatctccagcattccgctgctgcctggcgccggtatttattatacgatgagcatcggcctttcgggctccgtgcaggcggcgctgcaaaagggactggagacggccgggatcgcgggcagtctggcagttggcatcctgctggtgtcgacggtgtttcgtgcagtaaatgcacgcaggcgccgcgcatctgcacccggacgcgaataaacaggggggcgaaccatggaaaaatcgactgtactattgtttgatattgataatacactgctggacttcagcgccggtgcgatgcaggcaatggaggagatcttccgcgcggcaggactgccgtatgcgccggagatgttcgccgtgtttcaggtggagaacgacaagctctgggcgcggatcgagcgcggcgagctgacgatcgccgggctgcgggacgtgcgctggcagacgatcctggcgcggctcgggctggaggctgacggcgcggcgatggaggatgcgttccgcgaccgtctgcatgagagcgcggtcccggtcgcgggcgcgccggaggtgctggcgcggctgcatgggaaataccgcctgtgcgctgcaagcaacgggccgtatgcgcagcaggtgaaccgtctgcgccgggccgggatgctcgatgcgtttgagcggctgttcatctccgggcagatgggcgcagagaagccgagccgggtattctttgaccggtgtcttgcgcagctgcccggtgttcggtcggaacagtgcctgatgatcggtgattcgctcacggcggacattgcgggcggcagggcagcggggatgcgcacctgctggttcgaccccgccgaccgcggtgcggccatgccgccgcaggcggactggcgcatcacgcggctggaggaattgttcgatattctctaagaaagcgcaaaaagcagaccgccctcgctttgctgagcgagggcggctttcctatatgcatacaaaaacgcgggtgcagatcactctgcacccgcgcgggttttgtgcggttttcggggtcagccgaagatcagatcttcatgcagacgtcccatgcacgccagatgacggtgcgcaggttgccgatggcaacgcagtcaccgacgcggtgcacgtgacggcccttgtcgccaaccggagccggcacgaagccgatgccgttgatgacgttgtcgcaagcgacctcgaaggtcttgccgtcctgacccttgacggtaacgccgccgtcgtggatctcggtgatggtggagtgcaggtaggtcgggaccttgtggtactccatcgcgtcacgcaggaaggaggtgttggcaaggcaggtagcctgagcagcaaccaggtcgccggcgtactcgacaatgatcgggtgcttgccctggaggatcaggtcgtaagccgcctcgcaggaggactggccgccgccgaagaacagaaccttgtcgccgacttccttcttctccttgagcagttcggtgaagctcatggtcttctcgaagcccgggatcatgggcatggttctcggcacggaaccggtggccacgatgatctcgtcgaagccgcgcatggtgccaaggtcggtgacctcggtgttgaagcggatgtcgatgccctgcttcgcgacttccttcttgtaccactcaatgagttccttgtcgttctctttgaagctcatcgcggaagcggtgaggaacaggccgccgagctcgttggtcttttcgaagaggaccggcttgtggccgcgctttttgaggacaagcgcgcactccatgccgccgatgccgccgccgatgatggcgaccttcttcgggctcttggtcggaacgatcttatacttgttgtgctgcatggtcgtcgggttcagcgcgcagcggcccaggtgcagggaatcctgcgtgctctggatgttcgccgtgcccttgaacttcgcaaagttgaagcagccgttgtggcagcggatgcagggcttgatctcgtcctgacggccctcgaggatcttgtggatccactcggggtcaacgaggttctgacgcgcgatggcaactgcatcgagacggccggcagcgatctcttccgcggccttgaccggatccatacggccggcgcaggcgacgggcttgtcggtgaacttcttgatgtgctcgacgtactcgaggttgcagttgtcgggcatgtactgaggcggatgtgcccagtaccatgcgtcgtaagtaccgttgtcgcagttgaacatgtcgtagccggcatcgcccaggtacttgatggccttctcggactcgggcatgtcacggccgaactcttcgaagtcggtctcatacggcatagcgcccttgccccaagccttggtcttggagacgacggagtaacgcagggacaccgggaagtcggcgccggcctgacgcttgatggactgcacgatctcgaccgggaaacggaaacggttctcgaaagagccgccgtactcgtcggtacgatggttccagttggcgatggtgaactggtcaagcagatagccttcgtggacggcgtggatctcaacgccgtcgacaccggcctcacgcagcagcttcgcggtcttgccgaacgcatcgaccatctcgtggatctcttcgacggtcatcgggcgggagagcatgtcctcctgccaacggttcggggtagcggaagcggaagcgcagcagtagctgacgtcgatgacgggcttggcaagggcgccgagcaccttgttgttgttcagagtgaccatccagggggcaacagccatggagcggccgaaaccagcggcgagctgaatgaacagcttggagccggtcttgtggtactcgaccatgtagtcggcgagttccttaaacatcttcttgttctgccagagccatctgcggcccatggtgtcgcggacacactgcatgcccgggagaaccagaccgacgccgtcctgtgcacggttgagcaggaagttcgcagcttccttatcaaagtggcagggctccagccaaccaaacagagaggtgccgcccatggagcactggacaatgcggtttttgatctcgacattgccaatcttccacggagtaaatagcgcgctatacttttcgtccatgaaatacatccttcctttttcttttattacgaagatgatcctgctgttgctctcggcagatcatcgaacgttttcgtaagtataacaccgcggtgcagtgaacacgatgcatacatactgtgcatagcataacatactttttgacaaaaagcaatgaaataaaatcgaccggctcgtatattttgctcacaaaaagcgtaaaagagtgacacaagtggcagaaagcgtctggaaattccaaaaagaagcagcgctgcagaaagccaacgtttagtcaaataatggtatattttttgcagtgtgtcaattttcggacacattgacttccgggtgttcagcgaaaaaactacttgaaatccagcggcgactgtgctatgttaatgctattctttcttagacctacaaaaaagatatgtattaggaggctttgctatgagcaagcaactgaaccgggaggaagcctgggcactgttgacggagtataaccaggatccgttccatctgcatcatgcccgcacggtcgagggcgtcatgcgctatttcgcgcaggagctcggctacggcgacgaggtggatttctggggcatcgtcggcctgctgcatgatctggattttgagcgctatcccgatcagcactgcatccagtcgcaggagatcatgcgcgagcgggatctcgacgagcggctgatccacgccacagccagccacggctacggcatcacggtggacatccagccggagcacgagatggaaaaggtgctctttgcgaccgatgagctgactggcctgatcggcgcggcggcgctgatgcgtccgtccaagagcgtgcaggatatggagctcaagtcgctcaagaagaaatataagagcagcggctttgcggcgggctgctcgcgcgaggtgatccagcgcggcgcggatatgctcggctggagtctggacgagctactgacgcgcacgctcgacgccatgcgcgtggtcgagccgctcgtggccgaacaggaagccaaagaagccaaataagaaaaggccggggatgcgccccggctttttttacatctgcaacattcggcttgaattccttgtgatttggtagtatattatccttagcatctgcacacacacctgtgcagcaaggaggcaacagattatggtcatctcaaccaaggggcgctacgcgctgcgcctgatgatcgacctggcgcagcattgcgacgagggcttcatctcgctcaagaccgtgtcgcagcggcaggatgtgtccctgaaatatatggaggcgatcgcagcggcgctcaaccgcgcgaacctcgtcaacagccagcgcggcaaggagggcggctaccgcctgagccggccggcgagcgagatcacggtcgcggaggtgctgcacagcaccgagggcagcatggccgccgtgtcgtgtcttgacgccggggagaacggctgtgagcgcgcggcccagtgcctgacgctgccgatgtggaaaaagctcgacgccgttatggataactacctgtccggcgtgtccgtgcaggacctgctcgacggcaaggcataagggcgcagaaccggggaaagaacgtgtgttttctttccccggttttctttttcaaattcctattgacagtgtgggaaatacatggtatcatttacccacaaagcaaataggaattaaaggaggacagtctcatgcgcgtctacgcagacaatgcggcaaccacaaaactatcccccgccgcaaaggaagccatgcttccgtattttgacgagatctacggcaatcccagcacgctctacaccctcgggcaggaggcggccgagcatctgctcgcctgccgcactgagatcgcgcagctgattggcgctgccgatccgcgcgagatcgtgttcacctccggcggcagcgaggctgacaatcaggccatcatctccgccgccagaaacggcgctcgcaaagggaaaaaacatctgatatccacgaaattcgagcaccatgcggtgctgcacacgctcgacaagctccgtaaggagggctttgacgtgacgctgctggatgtgcacgaaaacggcgtcgtccgcgtcgaggacgtggccgcggccatccgggacgacacggcgctcgtgtccatcatgttcgccaacaacgagatcggcaccatccagcccattgaggccatcggcgcgctctgccgcgagcggggcatcccgtttcacacggacgcggtgcaggccgtcggccacgtccccgtgaacgtgcaggagatgcacatcgacctgctctcgtgctcggcgcacaagttccacggaccgcgcggcgtcggctttttgtacgccaggcgcggcatcccgctcacgaacatcatcgagggcggcgcgcaggagcgcggcaagcgcggcggcacggagaacactccggctattgccggcatggccgcagcgctgcgcgaggcggtcgaccacatggccgagaacacggagaaagtcacgcgcctgcgcgagacgctcatcgccggcctctcgaccatcgagcacgcccggctcaacggcgaccgcgcgcagcgcgtgcccggtacggtgaacttctgcttcgagggcatcgagggcgagtcgctgctgctcctgctcgaccgcaagggcatcgccgcttcatccggcagcgcctgcacgtccggctcgctcgaccccagccatgtgctgctggccatcggcctgccgcacgaggtggcgcacgggtcgctgcgtctgtccgtgggcgaatataacacggacgaggaaatggcgtacatcgtggacaatgtccggcaggtggtcgcctacctgcgcagcatctccccggtgtgggacgaactggagaccggcgcgcgcccgcacctgatttgacacaatatagatataaaggaggctttcctatggcactgtacagcgaaaaggtcatggaccattttgaaaacccccgcaacgttggcaagatgcccgacgctgacggcatcggtgaagtcggcaacgccaagtgcggcgacatcatgcggatgtatatcaaggtaaacgacggcatcatctcggacgtgaagttcaacacgttcggctgcggcagcgcgatcgcgtcctcgtcgatggcgaccgagatgatcaaaggcaagcccatctcggaggcactggcactgtccaacaaggcggtcgtggaggcgctcgacggcctgccggcccagaagatccactgctccgtgctcgcggaggaagcggtcaaggcggccgtgaaggactactacgacaaaaacggcatcgcctacgacgccgcgctctttgcagagcatgactgcgccgcctgtcacggcggctgataccaccctgctgcttctcctcttcccccttctatgttttgcggaaagcacccgtccattcggccgggtgctttctgtatgtccgcaaaaaacacccccgcaggtttcccgggaatcctgcgggggcgtggtgcgtcagtaatagatgctgtttcgcttgggccttggtcggaagtggatgcccgacaccatgccgagcgcggcaaacgttgtgaacagggaagagccgccgtagctgaaaaacggcagcgtgatgccgatgacgggcgtgatgccgatgcacatgccgatgttctcaaacgtctggaacgtcaaaaacgcggccacgccgaagcacacgagcgagcccatgttgctgcccgagcggatgccgaccatgacgcagcggatgatgatgatcagcagcagcacgatgacgaggatgcaggcaatcatgccgagctcctcgccgatgacggcatagataaagtctgtgtgcttgccggcgagggcgttggactggctctgcgtgccgtggccgaggcccgcgccggtccactggccggaagcgagcgcgatcttgctctggtgcggctgccagttgatgccggtgttcgtcgggtcgatgctggagtcatacggcgcgaggatgcggtttttctgatagtcgtgcagcacgaatttccacagcagcgggatcatcgcggcgatggccgcaaagccgatcgcaaaccagtgcagcgcaaagcccgcggcaaagagcatcacgaggaagatggagaaaaagatcagcgccgagccgaggtcagacgacacgacgaggatcagcccgaacagcagcacgaaatggcccgccaactgcgcgaccgaccacacggagttgaggtcgtggtattctttcaagtagctgatctgctttgccagaatgatgatgaacgcgagcttgacgacctccgtcggctggatgccgatgccgaaaaagcgcagccagccggtgttgccggtgttgtcgctcacgccgaaggggatcagcagcagtagaaagaccacgttgaacgcgcacaggatctgccacttgtcggccagcacatccacgtccagcacggtcatgaccacgaacgcgaaaacgccgaggatgagcgacgcgctctgcacgatgacatacttggccgagtggtacgacgccgtggcgctcgagatgacgacgatgccgaaaatggcgcagatgaggcccatcacgagcaggaaaatatccgcccggtgaaaaaactcctttgcgtaggacatggcttttttcataatggcctcctttccgccgcggcggcgttttgaaatcggcgcttattatatcacacaaaacgactttacgcaacggccgaaaccgtgctataatacttcttcagaatcggagggatatcatgcaggaatatctgacccacagcgaagcggagaccgaacaggccggcgcggactttgcgcgcgccctgccggacggcaaggtcgtggccatgtacggcgagctcggcagcggaaagaccgcctttgtgcgcggcatggcccgcggcatggggctgacgtgccgcgtctcgagcccgacgttcacgatcgtgaacgaatatgaagggccccgcgagctgatccattttgatatgtaccgtctcggcagtgccgacgagctgttcgacattggctgggaggattatgtcaaccgcggttccgtctgcgccgtcgagtggagcgagaacgtggaggacgctttttacggcgacgaggtcgtggtccggtttgaaaaactcggcccgacgacccggcgcatcacgatcacggaagggagcgggacatcatgctgatcctcgcactggagtcctcggccaaggcggcgtcggtcgccctgtgccgcgatggagtgctcattgcccagagccagcagtgcagcggcctgacgcacagctgcacgctgctgccgatggcggagcagatgctgaaaaataccgataccaggcttgcggacgtcgacgccatcgccgtcgcgcgcgggccgggctcgttcaccggcgtgcgcatcggcgtgtccacggccaaggggctcgcctggggcgcgcagaagcccgccatcggcgtgtccacgcttgaggccatggcgtatcacggtctcgcggcgggggagggcgcgctcgtgtgcgcggccatggatgcccgccgcagccagatctacaatgccctgttcgagatccggggcggaaaaccggtgcgtctttgtgaagaccgtgcgatttcgctcgcggagctgggcgaagaactgggaaaaatgcagaaatccgcttttctggttggcgacggcgcacagttgtgttataatacatgtttggacatgggcatccctgcggtgctggcgccgggcaatctggtcagccagagcgcgtggggcgtggccatggccgccttcgggcagacgccggccccggcggaggaactgctcccggtctatctgcgcctgtcgcaggccgagcgggaacgccaggcacggctggctgctcaggcggcgcaagaatgaaaaattgaatcaacaaaggagacgacgagatgagtaaagttcacgtttttgaccacccgctgatccagcacaagctctcgatcctgcgcgacaagaacaccagcgtcaaggaattccgcgagctgatttccgagatcgccatgctgatgtgctttgaggccacgcgcgacctcccgctcgaggagatcgacgtggagaccccggtcgccacggcgcactgcaagcacatcgccggcaagaagctggccatcgtgccgatcctccgcgccggtctcggcatggtcgacggcatggtcaccctgatgccgaacgtcaaggtcggccacatcggcctgttccgcgacccgcagacgcttgagcccgtgaagtattacttcaagatgccgcccgacatttccgagcgcgacgtcatcatcgtcgatccgatgctcgccaccggcggcagcgcgtccgccgcggtgcagttcatgaaggaagtcggctgcaagcacatcaagctcatgtgcatcatcggcgcccctgagggcgtggctgtgatgcagaaggagcatccggatgtggacatctacgtcgcagcgctcgacgatcatctcaacgagcacggctacatcgtccccggtctgggcgacgcgggcgaccgcatcttcggcaccaagtaattctctcctgttgatccgtaaagcaaacacccggtattggctcgccaataccgggtgttttttcgctttgttactgcaggttcaggtgcttgcgcagcatgccgtgcgtgaggaagaaatagcccacgcaaaacgccagcgcgcccacacacgcgcagccgagcacggtccagagcgcctgcaacacggtcatcgtgttgacggccgcgctggccgacccgtagaacgcgccgaagatcagcgccagtacgaggcgcgtgccgatccagagcacaaagaagaacacgacggacatgagccccttgtttttcttgaaactctgaccgatcgccatggcggcgtaggtcatcaggcacagggcaaggccgcacaaaaccaccagcacgaccacgccgacggtgagccagccggcctgcgcctgcgtgatcgtcggcatgctgtacggtgcgccgaaggtaaaggcaaaccgaaaccggacgatatcctcgtagccgccgatcgtgccggacagcagcaggccgagcgcgtcgaccgcgaacgtgccgagaaaccacacgatcgagacgatcagcttcgagaagatcagctccgtcgtcgagaccggcagcgtgaacatcaggtagccctcgtccgtcatcaggttgcggtaaaaccgcaggatcatgagcacgaccgtcgtcacgacggcggcgatgagtgagagtgaaaacacgaacgacacgagcgcgccgatggcgcggatcagaaagccgttctggttttcacacaggcgggtgatcaggttcgtgaacaggccgagcaccggcacggccgcatacagcggcagcatgatgcgcgctgtcgcgcgaaaatcctgctttaagagttttcctagcatctgaatacctcccgaaacacagcgtccaccgatttgccctccctggcgcgcagctcgtcggccgacgactgcagcagcagatggccgcggttgagaaacgccacgtcgtcgaggatgttctccacgtccgcgatcaggtgcgtggagatgacgacggcggcctcggggttgtagttgctgataatggtgttgagaatgaaatcgcgcgtcgcagggtcgacgccgccgatcggctcgtcgagcaggtagagcttcgccttacggctcatgacgaggatgagctgcaccttttcgcgcgtgcccttcgacatctgcttgatctgctgcttgggctggatgccgagccgctgcatcatctgcacggccgcgccgcggtcaaaatcatcgtaaaaatcgccgaagaacgccagcagctgcagcgccgtcatccagtcggcaaaataggtgcgctccggcagataggacacgatcttcttcgtttccctgcacggcgacttgccgtcgatgagaatttccccggcgtccggcgtgagcaggccgttggccagcttgatgagcgtgctcttgccgctgccgttcgggccgagcaggccgacgatgtgtcccggctcgaccgagaggtccacgcggtcgagcgccggctccgcgccgtagctcttgcacagacccttgcattcgagaattgccatgttacatttcctcctttgcctgccgcagattctgctgcagcagctcgagcgcctgcgcccggtcatagccgagctgcgccagcgcctgccagaatgcgtcgatgccggcctgcgccagccgccgcttttcccggtcgatgcgcgccagatcctctgtcacggtgcggccggccgtgcgctgcgtccggatcagctccagacgctcgagctcggcgagcgcgcgctgcatcgtgttcggattcacgccggcgtcggacgcgaagtcgcgcaccgacggcagcttgctcccgggcggaaactgcccgagaatgatcgcgcgggcgatctggtccacgagctgcgtgtagacaggcgcgtcgttgcggatgttccagttcatgatgccgcctcctgtcgaaattgtgtatcgctgtattaagtgattaagacaatagcacaatgtgtgcgggatgtcaagcccaattttgcaaaaaaacaaaaaccgcccgcagcgatcgctgcgggcgcaaagattgcagattcagattttgatttcttccttgaccgtgtcttccgcgaacggaagcgcagcggcccttcgctgtgcgagcaggccggggaggatggacaccagactgccgcagaggatgcacgcgataccggcgagcatattgcccgggattgcctcgtgcagcaccagaaacgccagcagcggcgcgagcgcgggcttgaagaagaacacgagcgacgttgtctgcgcactcgtgacctccatcgacaggaagtagcaggtgaagccgatgccggtcacgccgatgtagatgaagagcacgatcgggaggttggtcagcgtgtagccggtgaagaaggggatgctcgcaaacgtgtccagaccggcggccgtcaggccggcagagagggccggaatgtgtgtcaaacctgcgatcgcgatcatctcggccgcgccgaacagaaagctgaagcacgtcacgacgatgccgccgaagcgcgcgcactggcgcttgccgcacacgccgtagagcgcgaacagcagcgtcgccagcaggacgtacaccacaccgagcgcatcgagccgcaggtgccacggctggatgatgagcacgatgcctgccacgtccagcacgaggcccgcaatctggtttttcgagatcgtctcgtgcaggagcaggaaggcgaacagcgtcacgaacacggggttgctggaaaacagcacgccgacgaccgaagcctggatgcgcgtgacggatagctgatacagcgacatacttaccgcgatgcccatcaggcccagcagggcaaacgagccgagcgctttgccgtcaagcttccggccgcgctttttcagttcgcgcacggcgaaaggaatgagcaccagcccgccgacgagaaaccggctgaaattgagctggatagggttgaactgtccggagatcagcttcagcgcgacctccatgctggaaaacagcagcgtcgtgaccgcaatgtacagatagcctcgtttcatatctgcgccttctttgtttcgtacttgcacaagcggtttccgttgtaacactgttttggacgcttgtcaagaaacgtcaaatttccaacaagcaaaaccggcgcccggtgtcagccgggcgccggggcatatgcagttcgctcagcgcggcaggcggccggcgttgcgctcccagaacacgccgtcggcgtagccctggatggcggggtttgtctccgccagctccagccgcttttcggcccaggcgcagtactgctcgctgcgctcgatggcgacgaagcggcggccgagcttcttcgccgtcacggccgtagagccggagccggcgaaggggtcgagcacgatgccgccggggtcggagcttgcgaggatgagcttggccagcagcttttcgggcttttgcgtcgggtgggcggtgttttccggcatggaccagtagggcacggagatatcgtcccagaagtttgacgggcacgtgttgcggaatttgccgtccggcgtctcctcccagtccttcggccggccgtcggcgcggtagggcgcgcgcacgcggcggcgcaccttcacggcgtcgacatggaacgtgtaatcgtccgtgcgggtggcgaaccagatgtcctccatgccgtttttccagttgcgctgcgcgccgcggcccttttcacgctgccaggtgatgcggttctgcagccggaaatagtccttgagcgtcatgccgatgaccgggctcgagcgccagtcgcagcagacgtagaccgaggcgtccggcttgagcagcggcagcagcagttcgatccatgcgcgcgtaaaggcggcgtagtttgcgtccgtcgtgcgccggaagccgccgccggaaaagtccttggtcaggttgtacggcgggtcgacgatcaggaggtctgcaaagccgcgcggcaggtgcggcgcgacctgaaacgtgtcgccgcagatggtgcggccgcacacggcgtcgagcggcacgtcctccgtcacgcgcaggcagcgcgcgagatactccggcgcgtcctccggcagaaagtctatggtcttgttgcgttcggctttcatggtgtcacctcgcaagggaaaagcggctgttttgcgggcgcatcaggtccctcccatggcgtagaccatgtcccagaagcgcaggtcaaacaggcagcacgtttggaagatctcgcacagatgctgtgtcgtctgctcgtcgatgtccgcgctgagcgcgtcgatccggtcgatgagcgcctgattcgtctggcggtactcctccgaaacgtagcccgcgaaccacgcgccgtagtgttcgttttgaagcgcgtccggatagcgcgccgccatctcctgcgcgatgtaggcatagctccatgagcagtttaagagcgtcacgagtccggtcagcacgtccccagcctgcgcctcgcagagcatatagtggctgtaggcactgttgtcgatgtgcgggcgcgcgcggcggatctcgtcttccgtgacgccgaggcgctgcatgtacggcaggtgcgtgcggaacgtctcgcctatcgtgttcgccaactctccgctcagaaagcggatctgctcgaaatcatcggccttctggatgatggccgcaaagatcttcacgtagtccttgaggtagagatagtcctgcagcatatagtagcgaaatttttccatcggcagcgtgccgtccgccatctgcatcacgaacgggtgggagaggtaccgcggccagatgtcctgcacacacgcatggagccgctgcgagagctttgtgccgttatgcccgctcatttgtgcgcaatgatggcgacatagccgccgctctggtagccgggcacgacgtcctccacgacctcgttggtgtacatggggttgcgcagcagcgtctgataaaagtcaaaatcgtggaagccgagtgccttgagcgcgtcgatcttctcctcagtggagtgccacacgcccgcgcagcacagttcgagcgggtacggcagcttgggcataacaccgctgagcgacgggtggtcgaacgtgccggcctcttttgccagcagatacatgaagccgaacgcgctctccttgggcacgtccagggaaataaacttaccgttcggcttgagcgcctttttgcagacattgaatgcgcgcgtcagatcctccatatagctggagctgccgttgagatagatcacgtcgtaggcattttcctccagctcggcgtcctcaatcgcgccgaacgcgatcacgttcacgccgcgcttttgcgcgatcgcacccatgtcgtgcgagggctcgatgccctcgatgccgctgcagtcgatcatgctctcgaacaggccgctgccgcagccgacggagagcacgcgcttgtcggcaatgtcgccgagtgcggtctgaaacagacgcagctcgctctgaaacaggttgtcgttttccataaaccaggcgtcatactgcgccgcatagccgtcaaatttcggtttcatcatcaaaggtcctttctaagcatcatttcgtttgccgcagccggcggacgcgccgcgcggacaaaaaacaacaattttattatagcatacaagtgttttgcctgcaatcccgcaatgtcggcatctaaaagggaagcgcaaaagaacaccggcaggcatcttcggatgcctgccggtggctgcgaaggctcacttccattcacagtttcacaacgatggaagcggaattctcgttcctctccgggaggggaatcagctgccagccgcttcatatacctcttttaggcttaacttttcatcaaggtcacagaaacaccattcgagagttttttctgtgaacccgctcaattcccaatgtttgtatattgccagataatcatattgcttttggctgatgaaatggatgtcttgaagggtctggctctctgtattaaaaatcgcaatgaagtcacgatcacgcacccccatatcattacgcacatagcccaacagatagcacgtgccggttttctcgtcaaactccagatgtcttagtacggttcgcacatcttcagcaaacagtgtgcttacttttgtaaaggtgtttgtctcataaaccccaagctgagttcttaaagaagtgatgggcttctcgatattgtaaatattgtaaaaaaagctaccgtcgggcgaaaagcaaaatccttcatcctgtgcgccaatcctggtgatcgtgatccgttttagcagacagagggagtccagatcataaaaccccaggcgcccttctgtggacttcacggcgatgatattctttcccggcataaaagcggctgtatacgcatagggaatatcgcggaatttcgcaagctcatttcctgctttatcatatatataaaccgttctgccgctgcagcccacctgataagactcgttttgataaaagctccaaaatcttctcatgcgaacgctcctttttcgatgcgcaaattctcgattatttcattcattatagcatcaaatggggaatccgcaagaaatggcatgcgaaaactggcacctcggtagaatcttgctctctgctgctccaaacctcctttcactttacaacggacattttttcagcaaaaagcagggcgcgaatttgtaaacattttgtgaacaagccgccgtcgcccgccgttcgtcgctgcaactctttctgcttttacggtatcgcggcagcgatgggattgcgacatgccaacggcaacattggcgttaccattagcaacattcgaccagagtgtttttctttctccctaaccttactacaatttcaaaagcgctttttggccagttctgcaaaaaacgattgaaataaaccgtcttaccctctcttcaccactactacggcctgacttgggcagttggcaaagccagacacaaaaaatggacaagcaatctcctcatctttattcaatcttaatacgtcgcaaatgtcccttatccgctcttaaaatctccggctgtataatataaccatcacagaaataaggagctgcctttatgccggaagagatcattcgtcgaaagcgccgcctttcgtcttttcaaattatcatattaggttttgccgcggtcattctgctcggagcactgctgctgatgctgccgatctccacgactggagggaatgtaactccattcaatgaaacgctgtttacagcgacctctgccgtctgcgtgacagggcttgtggtgcaggatacaggcagctactggtcaacctttgggcagacggttattctggcgctgatccaaattggtggtcttggtgtcgtaaccgtagcagcgtcgtttgcactgttgtccgggcgaagaatctctctgatgcagcgcagcaccatgcaggatgcaatttcagcaccaaaggtcggcggaatcgtccgcctgacacgcttcatcctgcgagggacgtttctgattgagctgctgggggcgcttgccgtgctgccggtgttctgccgtgactatggagggcgcggcgtctggatggcgatatttcattccatatctgctttttgcaacgccgggtttgatattcttgggacagaaagcaaccgctatccatctcttaccggctacgcggacagcccggtaatcaatatcacgattatgctgttgatcgtgattggcggcattggatttctgacgtgggatgatatctttgaaaacaagtggcggtttcatcgctaccgaatgcagagcaaggtgattctcgtcacgacaggtcttttgatttttctgcctgctgtgtttttcttcttttcagacttttccgcgcttccctccggaaaccggctgctggcatccttttttcagtccgtcacgccgaggacagcgggcttcaacacggtaaatctatccgcgatgtccggtgcgtcgcagggcgtgatgatccttttgatgctcatcggcggttctccgggttctacagcaggcggcatgaaaacaacgacgctggcggtcttgattgccaatgccactgcgaccttccgccagcgcgatagtgcccaatttttcggacgcagagtcgattgcagcgctgtcaaaaccgccgcgaccattctgacgatgtatctggtgctgttctttggcggtgcggtctttatcagcgcatacgagcatcttccgctgtctgcctgcctgtatgaaacggcatcggcggtcgggactgtgggattgacacttggtattacaccgcagctgcgcattccatcgcaaatggtgctgatcttgctcatgtatctgggcagagtcggcggtcttaccctcatttatgcggcactttccagcaaaaaagcggggaatgcaaggc

SEQ ID NO: 13992 - DNA, 2300 bp, Unknown
  gut microbiota DNA sequence
catcgcttggattgtagcttcaacgattttcaattctctttcgtccaaggcgttcaacatggcatcaatccgcttcctgcactcgctcccgctattctgggacgggtaaaagtattgatccaccgatatatcaaacattgtaaccatctgataaaaggtgttgaagcttggatgctgaccatcattttcattatacataatggtacgcggagcgcggtcaacaatataggccagttgctcctgtgtcatgccgctggcttctcttgcacgcttgatggcgagccctatatcgtgaaaatcaaagcgtctttcatctcgttctatcttcataacatcacctgatatgattttacatttcatgtgatattatttgaacgactgtgtatttcatactactgactatttaatttcacatacgcaaaattgatgatcgcggaaatgtgaggtacaatatacctataactttgggacaatttgtcccgaagatcagaggttggtatctaaaataaaatcagaaatattgtgaggtttctgtgacatttgggtgctatactgaaaatgaaggagtgtgataccatgcgaattttagtagtcgaggatgatcggcttttgaataatactttatgctataacttgaatactgcgggctatacggttgattctgcactgacaaaatcagtggccagtagtttcttgacaaagcaggactatgacctgattgtgctggatgtaaatttgccggacgggaacggttttgacttctgccgggaaataaaagagcgtcgccctgataccgttattatttttctgaccgcaaatgatatggaaagcgatatgctcaaagggtatgaactgggcgcagaggattatgtgacaaaacctttccctatgagcgtctttcaaaagaaattagcggtagtgctgggtaggctgacaaaacaatatggtggtgatacttatgaggatggcacactgaccatcaatttttcagaaatgagtgctactctatcaggaaagccacttacattcaccccactggaatatcgacttttgaaaatcctgatgaaaaatccgcagattgttttgacccggcaagtcttgttggaaaagctgtgggacgcagacggaaattttgtggatgaacacgctctgactgcggcgatcagccgggtacgaaacaaaatcgaaacacctgaccgtcagtatatcaaaacggtatatggtatgggctatatgtggatcggaggagtgctgaaatgaatgtgcgaaaactttccgtcaacaaagcctgtatcttttttgctgttctcctgctggtggcaatggggacggtttcagcagctttgtatgggctgacccaaaatataaccgctgtctggtatgtattattgttcggcatttttgtgctggtttgcgctgtttgttttatggtgctggttcgccgcaaactggcaatgttctccgatgctttttgcagtttaatggatgatatgttatccgggaatatgcagccgaaacagactgtggaagaagaaagtcttttctataaaattgaatatcggctgaaccgtttatatgaagtcatgcaggaaaacaagaacggcattgcacaagaacgggctgacctgcaagaactgatttccgacatctcccatcaggtcaagaccccgattgcgaacttgaaaatgattaacagcactctgcttgaaaatgaagtccctgtgcaaaaacaaaaagagtttctaacggcacaggccagccagcttgataaactggattttctcatgcaggctatgattaaaacctctcgtttggaaacaggtgttatttctctggaaaagaaaagccagccgctttatgacacgcttgccgccgcattgggaggtattcttctgaacgccgagaaaaaacagatcaatgttcaagtggactgcccggagaacttggtcgtttcccatgacagaaaatggacaagcgaagcactgttcaatattttggacaatgcagtgaaatatacgccggagggcggtcaaatccgtgtttcggttgaaagttgggaaatgtatgtgaaaatcgacattgcagatacaggcattggcatttcagaacagcatcagggagcaattttcaagcgtttctatcgagaggacatcgtacatgatgtagatggaattggtattggtctatatctggctcgtgagatcgtaaccttgcaaggcggttatatccgggtaacatccgaggttgggaggggttcaactttttccgtctttctgcctcgacaataaaataagtacgct

SEQ ID NO: 13993 - DNA, 1526 bp, Unknown
  gut microbiota DNA sequence
acgcacgacatcaccctttttgaccgggagcaagcccgtgatattcgtccctgagtgtgcaacaggtgcaccgctgctgctattgtatcgcatatttttatacataggcgtatgcccgatgacgtttccatccatgtcaatcgcggcatcaagcaggtttgtatatgctggggcttgggctacagcggttgccgtgataacaatatcgccgatcacctctggaatagctatgaccccatctttgtaaaatgtggacacgtcctcacctcccatcatgatttttacattactgacttcgcaccccgtgtcggcagttatcgcagtacaataagactgcccgtcgatgacatacgcgcgtgggttgctacttgtgcattttgtcaaagcgacccgtacagctcgcctcagcacgtccgtgctgccacgcaatacagcagcagtcacgtccttcccgcccatcgtcactttgatggattcaatcaatttgccgttcgtgggagtgatgcttgctacgaacggctggtactgctgcacagatgccgctccgttgctgactgtgacatcagtgagtgtttttgtgatgctgtacgttgcgatatctgccgtcactgtctccggcgtcccgtcgatcatagctgctcggaaagcgttgattttttcgattgtaatgccgcacgacaccataaaattaaccaccttatcgcggaatgtcgcaccaggataggcattcaagtagttaatctcgcgcgtccacggcgtttcgttcctgcgacgggcttccgcatctgtgctgacgccagaattaaaactcgagagttcgtaatccttatcacagtcggattgtgataccccaagtatcgcttcgcacagcagagcgaccacgcccgttcgatctgcgcccgcagagcagtggaagtatgtcggcttgtttgcgatgacataatcgaagagcgggtcgaagatcgccttgatattcccgcttgacttctgatacgcaaggtcgttccatgtcatatcaacccacagcatatctacggtcggtccaaagccactttctgtcctgccgttcagttcagacgcaaaacgcaggtcaatttccttgaggattccgagcatatcaatcgcctgttgtctgccgtcatcggtcagatatccatacatctcgccgcccctgaagagcagcccgtactttaccctgccaccatcgcaatcccagcctccaagatcgcgcacgttgcccacgttcagcaaatgaatcatgcggcacgctccggtcggtttaatgacgccctgctggataacttttccgccaacaagcagcacaaaagttgatatcgagcccggtgtgcagttatagattgtgattgctcctgcgctgaccggctgcgaaacactgttacctgtgtacccgtccacgattgtcagcgttccggcggacttcatcacaatgtctacgccaacaggtcggtttgcgctcactgtcgtcacatattcgggtatctgcgagacagcgtagtccgaggggt

SEQ ID NO: 13994 - DNA, 2532 bp, Unknown
  gut microbiota DNA sequence
gccataatgcaccaatgtcacatcgtgatcccacgtaaaatatgcttcgaccacaaagttcgtctgcgatgggtagacgcttgtaatttgactttcgactgttcgcatatcatgccaccaccaatcacgtcagcggattgacgctgaccatgttaaaatccagggacgtaaacagctccttgccttcgttcaggcgcccgatattcagctgccctttgccgacgtaaaaccacgacgtacaccacgcgccatagtaggcggaaaagtagtgcagttggaattgctggcctttggcgatgatctttaggatctgcgacagcatagttttgctgatcgacgcccggctatatccaagtgcttcgaccgtgaacagcggactgacgacggccgcgccggtctgggtgcggccgctgtcctccgtgtaggtcgtctcaaagtcgtacgacagcgcgccagagtccggctgcggaagcaccagccattcatccgacgggctttttcgaattttaatgtattcctgtgccatgtgttacaccgctacaagcgggtttttacccgtttgccctttccgcaattttgcttcggtaatgacttcgtcaaacagcgtccggcgatccagccgtgcaatgaattcgtatcggctgccagcgctgccagcttcttcgcgcacgatctggcgcagcagggattccggtgcttccaggttgttgccgttgcgttggtcgcccaacacggccaagaactgccggttcgccggaatgaccgcgccgcgcgccagcatcgggatctgcggcactggcagtggattcacgccccacaaattctggaacggtgaaatgccgaggaagtgcgcgttgcggatcgtattcagcatgaaattgatcctgttgaacggcacggcgatgatcgtgttcatgccgcggataattgcattgacgaccgtgcggaaggtgctttcgatgccctccttgatgcctgaccagatacggccgccagtcgaaaacacgtctttgaccttctgccatgcgtctcggaatttgctctgaaaccactccggcacagacttgaaggcgcttttgattccatcccacgcagccacagcgccggatgagaccttttcccacagccccctgaaccagtcctttacggccgtccatttttcgatgacccagtccactaccgccgcgacacctgcttccacattggcgaggtgctgctcaaaagctgcatcgatactgctgattgttttattgacccattcctttatggacgtccattttgcgacgatccacacgaccactgcagctatagcggcaatcagcagcggtatccacgcccctgtgatgatggcaatagcgccgccaatagttagcagcgccacggtaatagccgtaagattcttattgttgaagccgtttttaatcacatcacgaattgccacgccaagaaggacaagccccacgacgattgccgtgattgctccgccaagcacaccgaatgccagcccaagcccagtgacagccgcagcagcgccgatgatgtaccctgtcagattgtcgaaatttatgccgtttttaaacatgtcgacaacgttgatggccatcaggacagcccccgcgacagcaagcgccagctgctttgccttcgacaaattccccaggaacttctttccgattttccacgcagcgaatccagcggccaccgccgccacatacggtgacagctcgcggacaacggctgcaatcttgccgatttttccggtgtcgacctgatcggacaaatcaaatttcggcgccgcaccagatgccccgtctccacctccaccgccggaactatcgttcgattcccagcggttcatttcatccagccccgaaagctgtttttttgccttctcggccgcatcccctgcggcctcggttgcggaagcctgattatacagtgcctttgcagatgcatccgcttgtgacgccgttttgccaaacaacgaattgataaacacggacacaacggcagtcaatttggcaagccacgccagaagcgttcgaattgccggcaaaatatagttgtagatcggtgcaaaagcggaaatcagattacccctgatctgtgccaaagatgttgacatttgtttgtctgcgccgattgtgctaagcagcattttgcgcatcgtacgcagtgctttggtaatcatggtgaaaatgaagacgcgctttgctaagccagcaattcgtttggtgaatttcttaaattgttctgacacattctgcgtcgtcaaagctgcaagacgctgctttcccacatattcgcttacggcagcgctggctttttcctgcgcgatctggctgctttccagattaagctgcgccgttttcagctgctgtgtcgttttctggattgcttcaccggtttcctgcgataccgtcccggtgcttctggttttcttttcgctttcttcgacggcccgcagctccgcgagctgctttctcaattcgtcgactttctgtgcagccttgtccacgttgttcgcggcct

SEQ ID NO: 13995 - DNA, 6254 bp, Unknown
  gut microbiota DNA sequence
cccgcgtcaaacttgccgctatcaatcgctgcttcgtataccagatcgccgacaacatcagccatcgcgcacaccccctgttatcagctgccggatgaattcatcttcgtcgtcggtcagatgcgccgacttgaaatcgatcaattcccggttttcgtcgtagtattcgcgttcccacttttccagtttcttgtgcttgcgcagcttccgccggatgtccaggatcgtggaaaacgtgcagtcaccgatctccatgtagtagccgatgaacgtccaccagtgcatgtacggcagcgcgcgcacgtcctgcccagctacgcggttgatcggcgcgatgatcatcgggaaatcctgttcccagtccatctgcttcggctgctgacgctggtcgccgcgatccacaccgccgtctaaaaaccacagcatgaatttcaccgcggcggccatgtccgtgatctgatcccagtccggataaaagatcttgaccgccacttcggcgcgatcctgatctgtcagctctgggtcattcagcgcggcgcagatgtccagaatttcgcggaagtcgcttcggatacgaaaacaccggccgccgatacacgctgtcttcggcaggccggtattcatgatctgcgcttcttcctgcgctgaccgccgctgtatttatccaggtattttgcctgacgcttctgcgcggcagcggtcgcagcgtccatctcgcgccggatctggcgcgaaaccgcttccaggaacgaaatgatttgcagggaaccggacggcgtgagcgaaacgcagtaggctttgccgaacactgtatcgcagacgggcgaagggaacgccgcgtccacctgttcgcgtgcgtaggcgtccagttctcggatcgtcgtgcgggcgtccgtatcgctttcctgcgtgcccatttcgtcggctttggccttgatcgccatcgctaccgcttccagccggtcgatgataccgatgtcgttcgggtcaaaatagatcttccggtttgcgtcgccattgatagtgaacgctttcaggccggtttcaaaagaaatgttattgctcacgccgccacccccttatgccgtcgccttcgtgaacgtggccacgccgtccgcaatggccgcagtgccgaccgtgcgcgtgccgccgtaggtcacgtcaaacggcatgtccaccgtcttgtcgccgcccagcgacttcacttcgattgcgcagccgctatagcgctcggcaaacatcgccgtgtccttcgtgccggcatagcagtgcacgatcatcatatcctgttcggccagcgctgcgacatcctgatccttgattgccagctgccacagcttcgtcagcgcggtttcgccggcgtccagattgcacgggtcaaaggtctgcgtgatggtcggcgcggacatggtggtaaacgtgttgcccaggatgtcctgcgtggtctccttgttccagtcatattcctgactgctgtcttccacacgcttgccgacgatcgaccaaactggcgcggaagatgtgccggtattcaggaaggccataagcagtttgcgggcaatcgtctggcccgcggttgtgttaaaagtcgtactttcaggcataatgcatcacctttcaaaattgttgtcgtaccgcatcgacagggacacggcccagtcttccacaccgtcggcatagcgtccggccagataggccgctgacacctgtacaaacgcggtaatcgtccggccatcgccgaggtccggccacgcggcaagcgtgtgctgctggccgtccgccgtgatcggctgtttttcaagccagcgcgccagcttgtccagccaccccttgatgtggatgcggtcagtttccgactgcggcacggcgcgatataccacctgaaacgcatagttgcatttctggtacacgccgcccatgatgtcggtcgtttcgctgatcaccgtcgccgcagcggacggatagatcccgacgccggacttgtcgcccagctcgccgaaccggatttcccgcgctccaatggccgggaaatcattcagcaagccgctcaggatcgttgaaaaatcttttgtgtcaaccattcgattcccccaggatgatccgcttgcactccgcggcccattccttgccgtgttcattttgggccacttccgcccagtgcggcacgccggtcgaaaaccgcagatcgcggtcggtcgcaactttcacagcgtccttgcgcgcccacggcgaaccggtttccgggtcgaccatgaccttacccatatacagataccttgcatatgggcctgggaacacgaccagccggccaccttctgcgacgtatgaacgctgctgcaggctgccggttttccacggcatatacagtttgctgtccgcaagcacctgcttccccagccattcctgcgctttggcgaatcgcgggccgtatttggcgaaccggagatttacccggacgtgccctttgacatagctgacgttcttatagtgcttgatatcgctcatgatgccgtcacctcgaagtgtgcaatcagcggaaaccacgcgcaggatgtgatgcggtggcactccgtgactttgcacagcgcgtcatattccgcccattcgtgctcgccgcggcagaaataatcgcccggctgaaacgcaatcatgccgctgcggtcatccgccgcctggtacacttccggcgtcgcgtaggtcagcgcgccaatggccgctttcgggacaagcagcagcacatagtgccccggcacatcgccggtcgtacctggcgtcatagcggtttttgcttccactttgacgccagctagcacgtgccacacccacgtatcggcctgaccgcgcgcgccgcgcacgcgcgaaaaaagcgtgatcgtatcgctatgcagcagcatcagcacgtcacccccgcgtacagcacaaggacgccatccacggccacgccggaaagccagcgccgaagcaagtcaaacaccagctcgtctcgcgctgctatggtcttcgcagcggtcgtgtagcagctgtcggccgccttatatgtgatcgattcgctgccggacgacaccgacgccacagggccggcggtttttacgccgccgacgtctgcggtttcagccgcgctgtcacgcgcctggtcaatgcggtaaagacattcggccagttcgcacgcgcagtcctgtagcttttcggcgtcgatcgtggattccggcagcgtgccaccgaagcggtcaaacgtaaagcggtcgatctcccgcgacgccgcacgcaggtagcgtgtggcggtcgattcatcgcagaacggggacagatcgtccccgtaccgttttacgtatgtgtcaaaatccgcgtacaccgtgattcacctgccgatcacgcgcttgcgtaggacttcacgtgcacctgcgcagcgtccagcacacgcagggcggcgttttcctcgacctgcgccttgctgccggcgaaaagctcggagtcgaccatgcggacgatactaaagttatcgccgacaccgaaggcgttcggatcgtacatgatgaattccaccttcgcgaggttcgccgccgtgacgctggccttcgtgccaccgtgcggatagtaggcaagatcagcagaggacgcgaagccgttgacttcaatccaggtgaagcccatgaagctgccgacctgcccgccggcagcggcggcaagcagcatctcgttggacgtcgggatgtacttctcaccggcgaactccagcatcgtggcaaagaagtccgggctgcaaagcacgatggtgggattggctttcgccttgaccatggccttgcgttcagccagcacctgcgccttgaagttggacgcggtggtcttcgtggtgttggtggatgccgtaccctcggagatcaggcaggccagcgcgcactgattctttgcctccgcgacttcgcgggtggcaagggccagatgctcctcggcaatcgggaacgccacagcggccgcctgcacgccgtagatcttcttcgacgcctgcaggttgttgttgaaaacggcctgaaccagcgtgtcagcggcggcggtgtccgcgaagtcacggccgggcgtgccgacagatgctgcggtggaggtcagcttgtgccagtagcagccgccggcgccgtcgaccatcacgtcctgataggtcacaccgggcacaagccaggtcttataaaacaggttgggaagaacagttgccttgtactgctcatccacgtaaagggaaccgtactggatagacatagatcatcatttcctttcgtagtcttagcccctgaaaaacggattgtttttgtatttctgggctacgtattcttttgcgccccccgccggcggcaccatgccgctgtgatcggaagaaaagcgcgccttgctggcgggatcggccacaaggatgccggggatctccttgccgtcccgatcggtgacaaggccggtaaacaggtcgtcgatcgacttgccgcgcgcatcgtcagaccccagtgctgtcaccagcttatccgtgatgctttcgcgcgtgatgtcgttgacgaaatgctttcccgacaggaacgtgtccaccgtactgcgcagcttcacggcggcagcgtccttcttgcggttgtcccgctcggtctgcaggtcattggtcagtgtcgtgatctgacccttcagcgctgcgacatccacgccatcaaaggcggcaagcttgccctgcacgtctttcagcgatgtgtccagcgcgtcgtggcgttcctgcagcttggtgaattccgccacggtcttgtagttctcggcgacggccttgcgcagatccgtcgcttttccttccggaatcgtaataccgaagtcggaaagaatggtctcgatgttcttcatgcgtaatcctcctgaacgtggttttttaacagcccgtcgactgtgtggattgagccggatgaaccaccggcagggtcgtgatatggcaaaggggcagccggtttcccgtccgcccctgcgtatcctgattcgattttgggtataagaaaaccaccttgccgatttggtaagatggtttctctaattattatgtgaaataattttcacgtcggatttatcttgacgttgtttttaaatgtccagctggtcgcagatctgcgaaagtgacttaccacaaataaacggaatattcattgcatcgtccaccgaatgtgcgtccactgcatatccatcgtagcaaagtgcaatgtcctcccggctgaacggacaaatagacccgaatttcccttgatatgcaaaatcaatgtcttgggtaagatcatcaatccaagcccttaaatccttcgcgttcacagtatatccgcgttctcctttcgttcctgatcggtgagctcacgcgtcgctctggtctgacgcctgtcgtcatcccaggtaatgtcgtgcgcgtgctctcctttggccccgtatggatgccttttcggattcccgtgcggcccattactgatctgcctgcattgccaaccatccgcatcaaaaaatgttctgtcgcgttgtttgccgcccatagaagcggtatcaacaactgcataagaacgatactgcccgggaacgtgtggtttggcttttgaagtccagtcatcagttacaactatcgttccgtctttattatagtgatatttcttgtatttatcaagttctttgcgtaccgccgcagatgcggttgacgccgctgagcgatcccaccccgcaacggcgagccgctcgtggtatggtttcagatcattttcttcgcaaaacttcgcgtacgctgcgttctggtcctgcaggcgcttggcggactgcgtgtatttctcctgcagctttgccttggccaccggatcttcacagtttttcacggctgtgtgcagcgccgtgcacttgcgcttctgcgcccggatgcggcgttccatcgcgcgctgcgtctgcgacagttcataggcgcgccggttggcttcggtatcgatcggtttgttgtgattctggctgacgcccggcaggaacggcgtgaaggaatggcggcagttatagccgcacaggccaagcggattttccgggtagccggtcgcgtccagcaggttatcaaactgcgcgtccttgccgtcgatacagtacaccttgccctgccatccggcatgatcggcgatcgaatcggtatcggatacacgcgcgcccagatgctgcgacaccagcacatgattccagcccatgtctttgcactgctggatcgtcatgttaccggatgactg

SEQ ID NO: 13996 - DNA, 1324 bp, Unknown
  gut microbiota DNA sequence
gagaatgacgccggttcatctgatttcaaaaaggagagaggtacatatgccgcgagaaaaagaaaccttccggcttgagctggaggaaatcttgaagttcaccggcggccgccgggtgctgacggtgacagacgtcagcaattatacagggcaaagccgacgggtgtgccgcgagcggtacaacgtcagcgggaaagagggcatcagcgccgtggcgctcgcccagatgctggccagataggtcaagagaaaggagaaaccaatgaaagcaacaggaatcgtcagaaaggtcgacgagctcggccgcatcacgctcccgagggagctgcgccggacgctcgatctccaggagaaagaccctgtcgagatctacacggacgggaaaggcatcattctgcgcaagtacgcgcctggttgcgcgttctgcggcagcgtgaacgacatccggtacattcacggcacgccggtgtgcaatatctgcgcgaacaacatgcagatgctgtaccgaacggcagaggggagcgacgacgaatgaaggtgttcggagatccgcgcgccaaggcgaaggtgcgccgctacatcgtctggggtatcgaggatggcatcgtctgcgcgtcctttatcgccggcatcgcgctggcggggtggctgtttcacatcctcttcgctgcgctcggcgtcgcatgagacgtccggaggtcgtatatatgtcaccggcagagctggccatgcgacgccggaatgaccgctgggcagcgcatggccgcgcgcgggtggcgctcccggggcgcaaggccgtggtcgtaccgtgcgcatcgccgttcgcggcaatccagtgcgcggcggagctgtggggcgtcccatggcaggaagtcgtccacggggcgcgcgtcatgtgggcgccgccggagacataaaaagacaccgcctgcgaagatcgtcaaacccgcaggcggtgaaaacccaatagcgcagggcgcactacactatatattatagcatacagttgcccgccctgcaagccgaaaaacgctgacgccgcaaggcgttttcagcttcggtaagaccaattactaactcgaccggagaaagacagggaggcaatcatgccgtatgtacatcgcaccgtcgtgtgcggggaaacggtcgagcaccgcaagatgtattcatcccgtgtgcacagcaaggaggtcaagccgcgcaagcgatcatccgaaaaggagacctccaagtgtcaggagcgcatcaacgagcgcgtggcagaggagcacctgcgctggctcatcaactgcaactaccattatggcgacttccatatggtgct

SEQ ID NO: 13997 - DNA, 2789 bp, Unknown
  gut microbiota DNA sequence
gccgtgctcgaaaccaagcacatgacgaacgtgcatcatcacatcctcctgccgcgctttgacgcgcagatcatcgccgctgcctggacaaaggtgaccaatggcgcggggtctatcagcttccagatgctcgatgaccggaagaaccacgcaaagctcgcgtcctacctcatcaaggaatcacgctccaccatgcgccgctgccgcgagcagggcatccgccgccggcggtatacctgcagcgccggcatggcaaagccggagatccgctatcaggtcgcaaaggccgagacgtggcgcaaggagccgaaggccagacggggtatgcatctctatcgctttgacgatgggtcggagtataagagcggctggcacgaactgagcggctggccgtggcaggagtattacgagatcaaagacaccgcataggaaggagcgcacacaatgggcatcagcatggacagcctgccgccgcgctatcagaaacaggcggcgcgcaagctggatcctgtggcgtatgaaaaggcgctgcagtttttccacgccgaggagtcggcgaaaaacccagcgcgtcaggcacaggggagtatcagccgtgcgaccggggaaggctttgaggcgcagattctcacggcctgcgcgtattaccgggcgcatggcatcgcggagatcgacaagacgccggagccgatcaaggtcatttccggccggcgtcagaatccgagcggctgctggtcgttcgaggcggttttcaccaagcaggcgcagccggattttcagggcacgctatgcggcggaagcagcgtagtgttcgaggccaaggcaacagacaaagaccgcatcctgcaaagtgcggtcacggaagagcaggcgcgtgcactggaatcgcacgacaatatgggcgcactggcgtttgtgctggtgtgcctgcgcgggcgcgcagtgtatcgtatcatgtgggaggactggcagaacatgaaagaactattcggccataagtacatgacggccgtggagctggagccgtaccgggtgcagatacgccggggcgtgatcctgtttctcggcgatccggagtgaggtgggcacatggcaatcaaaaactatacgacgaaagtggacgtatatacgtccatcggggaaatccaaggcgcgcttgcacgccacggcgccaccaagatcatgattgactacgataatggcaagccgcaggcaatcgcgttcgggatcgacacgccggcggggccgcgcggcttccgcctgccggcggccgtagacggaacgctgcgagtgttcgcggcgcagaagatcaaggccgaccgagagcaggcagaaatgaccgcgtggcggaatgtgcgcgactggatgctggcacaaatggcgctgatcgaatcctgcgatgtgccgatgcagcagatcttcttgccgtatatggcagatgatcgcggacggacggtgtacgagctgtatgccgctggacggctcgcgctcggcacgggggaggcgacatgatgctgcgtacacaggagacgcttgacggcgagatcatcgttgacagctttgccggtggcggcggcgcgtccacgggaatcgagctggcgcttgggcgcgtcgtcaatgtggcaatcaatcacgacccggcagcgatccggatgcacgaagcgaaccatccgtacacggagcattaccaggcatctgtctgggatgtgaatccggagacggtctgccgaggtcggccggtggcgctggcatggttctcgccggactgcaagcatttttcaaaggcaaagggcgcggcgcttgttgaccgcaagatccggggcctcgcgtggatcgccctgcgctgggcggcgaaggtgcgcccgcgcgtcatcatccttgaaaacgtcgaagagttccagacgtgggggccggtgcgtaaggggaaaccggtaaagaaactggccggtacgacgttccagaagtttgtcgggcagcttcgggcactggggtataccgtggaatggcgcgagctggtggcagccgactatggtgcgccgactaccagacgtcggctggtgctgattgcccgctgcgacggacgtgcgatcgtctggccggagcgcacacacgccccgcgagacagtgcggaagtgcacagcggaaaactgctgccatggcgcagcgccgcggagatcatcgactggtcgctgccgtgtccttcaattttttcgacgaaggatgaaatccacgagcggtacggcatttccgccgtccggccgctggcggacaacaccatgcgccgcattattcgcggcgtggacaagttcacgatcaaatccggggcaccgttcatcgttgattgtaaccattcaggaggtgggcacgtcacggatagccaagagccgtgtaaaacgattacggcaaagcacaccggtgacatttgccggccggccctcacgccgctgacgatgacgaacaccagcaacagtgtcggggcaccggtctccgaaccaatgaacacagtccgtacaggcggaggcggcgggcagatgctgctatcgccgtcactgatccagtaccacacggagaaaacagaaagcgcccgagcggctggactggataagcccgtctgcacggtggacgcctcgaaccgttacggccttacctgcgcgaatctggtggagtattacggcagaggccggccgttggatgtgcaaagcccgatgcatgcggtcacgagtcacgaccgggaagccgtggttgctgcacatgtagtcaagtacaagcgggacgaggtcggcacacgg

SEQ ID NO: 13998 - DNA, 1229 bp, Unknown
  gut microbiota DNA sequence
ttggctgctgcaaggcagtgctttgtaaaatcggcacatctgagcggcttcactactggccgcagatccgcgatctgctgaaccggtactgtggctacgcactgggcacggatgacctgctgctcctgtcaatcggcggggtgctgtactatatcgcggatatcggcttgcggatgctgtcgcctcgggagctgtacaacgccatgggctttccgccggattacatcatcgaccatgatgcggccggaaagccttacccgaagacacagcaagtggccagatgcggtaatgccgtctgcccgccgatggctgcggccgttgtggcagcgaacctcccggagtatgcagtgcccgggaaaattgagacgatggccgcactcgctggtgcggtggccatgtgatgggggcgaatctcagtgaatgcacttttgaactaccccggcgcaaagtggggcatggcacaggaaatcgtgcaaattatgccgccgcacagatcctatttggagccgttcgccggttctttggccgtactgttcaacaaaccgcgatcggcgatcgagaccgtgaacgacatcgacggggatatcgtgaatttcttccgcgttctgcgcgcagagcccgagcggcttgcccgggaaatcgacttgacgccatatgcgcgcgcaatatttgacgatgcgtacgagaatcgcggcgaaacagacttcgaccgtgcggtgcggttctgcatccggagcaggatggggcacggcttcaagacgtatcaaaagaccggattcaaaatcgacgtttatgcgcgtgagcgtagttactgcctgaactgctggaacgatatgcccgagaacatacgggccgcggccgagcggctgaaagaagtacagatagagaatcgcccggcgctggagctgattcggcgtttccggcacgagaacgtgctaatctatgcagatccgccgtatttgcttgaaacgcgcagcggaaagcagtatcggcacgaaatgacagacgcggaccatgaggcattgctggcagcgctgaaagcacatccggggccggtcatcctatccgggtatcattcgcctatgtatgacagtgagctgcacggctggaacatcatcgagcggaaggcctataaccagaatggcgataggcgcacggaagtgctctggtgcaattacgaaataccgacattgatcggataaggaggacaaccatgaagatctacatat

SEQ ID NO: 13999 - DNA, 494 bp, Unknown
  gut microbiota DNA sequence
gcttgagcggcagggcgcgacggtcatcaatccggccacagcgccggaggggttggccaagctggactatatgcgcatctgtttcgccgagatggaggcggtggactacgtcgtgtttcttccggactgggcggaatctgccggcgcgaagctggaacgcgcgtggtgcgactatgtcggcgtgccgacggcagactgggacaattttcgggtagatatgcttgtaaggaagtcgcacggctgcacattccgcgagctgctggttatggagcatccggacaaggtggatgcatgcttcatcggcgggtgtgcgggatgtccggaggaatacggatatgagccgggaaatggtactgaatgtctatgcgaaaagaactggaatacaaagaaaagcgtgccgcagatatgcacagagtgctgggatcgcatcgtcccggggagcgaggcggtgtgaaatgatgactgacaaaggaggtgaggatgttggactggaa

SEQ ID NO: 14000 - DNA, 1272 bp, Unknown
  gut microbiota DNA sequence
aacatcagagatcagatcgctgacctggcgacggagatcacgagcatccgcagcgcatcggcggacggcagtccggtcgccggcggctcaaacggcagggacgatgcgctcgtcaacaacatcctgaaacgtgagcggctggaagaggcgcagcgcttgacagagaaccgtgtacgccgcgtggatcgtgccttgaatcagctctctgagcgggaccgctgtgtgctgcagcgtttttacatcacgccgtgtatcggcggcgtcgagcggctgtgccgggaattggccatcgagaaaacgaccgcttaccgttggaaggattgcgcactgcggaattttacaatcacaatgtacggcctcacagagacgtgagcgtaacgtgggaaaaaatcgggaacattttcacgggaatctgtgttaaagtgatatcgcgggattgcgagagagaccggtcccgcaagtcactttgtgatatacctctcttcctttgattctttttgcagaatgtacgcatggctttttctcttgtctctgtcaactccggttttctcatgtctctcaacaaagcaaagcaccggcccggtttcgggttcggtgctttgtgcattctggtgcggttatgaatctgaaacaacttacctacaaactgcaggcggcgctgaaccagcgcggcgagcattacaaagtcaatcagttacagcactactccgagcggcttggccggatggtaacaaaatacgtgctggaaaaggcagaaaccgatgaaaccgggaagcatatcagcacgcgcgtactggagacttacagcatggcggatgtcgtaaaaacgctggcgaaaatctatagcgggtgatcccatgaatctcacgccaaagcagcgcgcttttgcggatttttacatcgaattgggcaacgcgaccgaggcagcgcgccgggcggggtactcggcgaaaaccgccaaatccatcggagcggaaaacctgacaaaacctgacatcaaaatctatatagcgcggagacaggcgaaaatcgaatccgagcgcacggcatccctgaaagagatccaggagctgcgcacggcgatcatgcgtgggcaggaaaaagaccagttcggcatcgaaacctccatcgctgaccgcctccgcgcggcgggggatttggagaagtcgctgcgcatcaaggaagagcaggaaacaaaggcagcagcgcgcgcatccgcacattatgagctgccggcgcgtgtccttggcagggcgttcgtcgacatcaacc

SEQ ID NO: 14001 - DNA, 991 bp, Unknown
  gut microbiota DNA sequence
gtcgagctgctgaaaaacaacccgacgatgcacgcttgtatcatccgcaagatgggcaacactctgaaagacagcgtgtatgcccagatgaaatgggcgatcaacgaactggggctgtatgatgaattcaactgcaagctgtcgccgctggaaatcgtgctgaaagaaaccggccagacgatttattttcgcggctgtgacgacccattgaaactgaaatccatcaagccgccattcggctatatcggcatcctgtggaaggaagaaaaagaccagctttgcgggccggaagaagaacgctccatcaaccagtccgtgttgcgtggcggtgcggattcttatgatttttcgtcgtataacccgccgaagagcaaatccagctgggtcaacaaggagcggcttgtcccgaatccggggcgcgttttccaccattccagctacacagaagccccgccggaatggctgggcgcgaagtttattgccgatgcggaacacctgaaagaggtaaacccggcggcgtatgagcacgaatatgaaggcgtggccaacggtgacggcggcagcgtctttgactatctggagctgcgggagatcacagatgaagagatttcacatttcgaccgcatctttcagggcgaagactggggctggtatcccgacccgtattgcttcatccgttgctactacgacagcgaccgcgaggcggtgtatatcttcgcagaacactacgtcaacaaggaatcgaacgaacagacggcgcgttggatcatcgagcacggctatgacgattacaccatcacggcggattcggccgaaccgaaaagcgtcaacgaccaccgtgaaatgggtctgcctgtcaccggcgctgtcaaaggcccggggtcgatcgaacacggcatgaagtggctgcagcgcaggcgcatcatcatcgacccggtgcgctgcccgaatgcggcaaaggaattttcggagtatgaatacgagcgggacc
